(19) United States
(12) Patent Application Publication
(10) Pub. No.: US 2008/0026047 A1
(43) Pub. Date: Jan. 31, 2008

(54) Cancer Detection Reagents And Uses In Pathology And Diagnostics And Cancer Cell Death

(76) Inventor: Don Adams North, Arlington, TX (US)

Correspondence Address: BAKER BOTTS L.L.P.;PATENT DEPARTMENT, 98 SAN JACINTO BLVD., SUITE 1500, AUSTIN, TX, 78701-4039, US

(21) Appl. No.: 11/690,638

(22) Filed: Mar. 23, 2007

Related U.S. Application Data
(63) Continuation-in-part of application No. 11/339,052, filed on Jan. 24, 2006.
Application No. 11/339,052 is a continuation-in-part of application No. 11/311,594, filed on Dec. 19, 2005.
(60) Provisional application No. 60/646,961, filed on Jan. 25, 2005.
(60) Provisional application No. 60/669,639, filed on Apr. 8, 2005.
(60) Provisional application No. 60/747,260, filed on May 15, 2006.
(60) Provisional application No. 60/743,699, filed on Mar. 23, 2006.

(51) Int. Cl. A61K 9/127; A61K 31/7052; A61P 35/00; C12Q 1/68; C12N 5/08; A61K 39/395

(52) U.S. Cl. 424/450; 424/138.1; 424/155.1; 435/375; 435/6; 514/44

(57) ABSTRACT

Cancer detection reagents have been identified through comparison of cancer mRNAs with the transcriptome of healthy cells. These cancer detection reagents may be used for a variety of purposes including diagnostics and targeted destruction of cancer cells. In diagnostic applications, peripheral blood or other tissue samples from a subject may be analyzed to generate a cancer profile for that subject. That profile may then be used to guide cancer treatment with known agents. It may also be used to generate agents capable of killing the subject's cancer cells in a targeted manner. These agents may include antibodies and siRNA, RNAi, or antisense RNA.

### PRIORITY CLAIM

[0001] The present application claims priority as a Continuation-In-Part under 35 U.S.C. §120 to U.S. patent application Ser. No. 11/339,052, filed Jan. 24, 2006, titled “Cancer Markers and Detection Methods,” which claims priority as a continuation-in-part under 35 U.S.C. §120 to U.S. application Ser. No. 11/311,594, filed Dec. 19, 2005, titled “Nucleic Acids for Apoptosis of Cancer Cells,” both of which claim priority under 35 U.S.C. §119(e) to U.S. Provisional Patent Application Ser. No. 60/646,961, filed Jan. 25, 2005, titled “Cancer Detection Reagents and Uses in Pathology and Diagnostics and Targeted Cancer Cell Death” and to U.S. Provisional Patent Application Ser. No. 60/669,639, filed Apr. 8, 2005, titled “Cancer Markers and Detection Methods,” all four of which application are incorporated by reference herein.

[0002] The present application further claims priority under 35U.S.C. §119(e) to U.S. Provisional Patent Application Ser. No. 60/743,699, filed Mar. 23, 2006, titled “Cancer Detection Reagents and Uses in Pathology and Diagnosis and Targeted Cancer Cell Death,” and to U.S. Provisional Patent Application Ser. No. 60/747,260, filed May 15, 2006, titled “Cancer Detection Reagents and Uses in Pathology and Diagnosis and Targeted Cancer Cell Death.”

### TECHNICAL FIELD

[0003] Embodiments of present invention relate to cancer pathology and therapy, in particular, those pathology-based diagnostics and therapeutics that utilize individualized genetic profiling.

### BACKGROUND

[0004] Cancer results when a cell in the body malfunctions and begins to grow uncontrollably. These malfunctions result from mutations in the cell's DNA blueprint. Thus, while early cancer diagnosis focused on the growth properties and the physical appearance of suspected cancer cells, more modern techniques have begun to examine the cell's inner workings.

[0005] Not all cancers are caused by the same mutation. Some treatments that work well for particular cancer-causing mutations are ineffective against cancer having other types of mutations and may actually cause more harm than good if inappropriately prescribed. Thus, it is imperative that cancer diagnostics' ability to distinguish different types of cancer keep pace with the ability to treat different types of cancers appropriately. Current diagnostic methods are struggling to match the speed at which new treatments are developed.

[0006] Another problem with current cancer diagnostic methods lies in the need for tissue samples to analyze. All presently successful cancer diagnostic methods, other than pure imaging, require cancer cells to be removed from the patient's body. These cells are most commonly obtained from a tissue biopsy. While effective, tissue biopsies are expensive, time-consuming, and painful for the patient. Additionally, the time required to schedule and obtain a tissue biopsy then analyze it causes a delay in treatment and the biopsy process itself may release cancer cells into the blood stream, resulting in increased metastasis.

[0007] Even worse, in some cases a tissue biopsy is not possible due to the location of a tumor. In those instances, the exact nature of the cancer cannot be determined until after surgery has been performed and the tumor removed. While these post-operative tests are still useful in directing further treatment of the patient, if the nature of the tumor could be determined in advance, it might be much more feasible to try non-invasive treatments, such as chemotherapy, before putting a patient through the rigors of surgery. Even if surgery were required, the patient might still benefit from a more detailed pre-operative diagnosis. Such a diagnosis might, for example, allow pre-operative treatment with drugs designed to minimize the chance of metastatic spread of cancer cells dislodged from the tumor during surgery. It might also provide greater direction for surgical techniques, such as how much tissue surrounding the tumor to remove.

[0008] Currently, some of the most successful cell-based diagnostic methods utilize non-biopsy samples. For example, PAP smears look for cellular irregularities, but utilize cells normally sloughed off by the body. PAP smears continue to save thousands of lives each year by allowing easy and very early detection of cells in the process of becoming cervical cancer.

[0009] Because of problems associated with biopsies and the success of simpler methods, such as PAP smears, the medical community has spent years searching for cancer diagnostics using another readily available sample, blood, particularly peripheral blood. Their efforts have met with some success. For example, the progress or recurrence of prostate cancer is readily monitored using a blood test. However, current blood-based cancer diagnostics, like the prostate cancer test, still remain focused on particular types of cancer. The need remains for a cancer diagnostic able to use blood to diagnose a wide variety of cancers or cancer in general.

[0010] Outside of tissue-based cancer diagnostics, most diagnostic methods rely on imaging techniques ranging from simple X-rays to MRIs and nuclear imaging, often using cancer- or tissue-targeted contrast agents to produce better images. However, even the most powerful imaging techniques cannot detect tumors smaller than about 2-5 mm in diameter. By the time a tumor has reached that size, it contains thousands of cells. Further, these sophisticated imagining techniques are too expensive to use during early stages of cancer, when the patient otherwise has no symptoms besides a small tumor that could easily be removed. Rather, complicated imaging diagnostics are most often reserved for patients who have had a large primary tumor and are suspected of having developed metastatic cancer. The small tumors detected are actually metastases produced as the cancer has spread. Thus, unlike primary tumors which often contain large numbers of benign cells, the small tumors detected contain thousands of malignant, metastatic cells, each of which is able to seed another tumor elsewhere in the body.

[0011] Clearly, detection of small metastatic tumors through current imaging techniques is really a last-ditch effort to save a critically ill patient. If these metastatic cells could be detected much earlier, such as when they first begin to travel through the blood, then a patient could begin receiving treatment for all of the metastatic tumors he or she would likely have while those tumors were still far too small to be detected by diagnostic imaging or any other current techniques. Thus a need exists for much earlier diagnosis of metastatic tumors, or detection of a greatly increased likelihood of metastatic tumors.

[0012] Yet another drawback in modern cancer diagnosis relates to its ability to be coupled to treatment. While some common mutations can be diagnosed through tissue samples and used to direct treatment somewhat specific for the patient's type of cancer, this approach is applicable for only a few types of cancer. Currently no diagnostic method is able to detect a wide range of types of cancer or to provide detailed targets for treatment in numerous types of cancer.

[0013] Finally, current cancer diagnostics, particularly those that rely upon tissue biopsies, are very poor at monitoring the progress or effectiveness of treatment. Thousands of dollars and possibly even patients' lives could be saved if treating physicians were able to tell when all or a substantial number of the cancer cells, or of a particular type of cancer cell have been eradicated. Additionally, by their nature cancer cells are able to change very rapidly. Thus, they may mutate even further during the course of a treatment, causing what was once a helpful drug to become powerless or harmful. In essence, the cancer cells may become resistant to the drug, much as bacteria become resistant to antibiotics. Cancer treatment would benefit greatly from diagnostic methods able to detect these and other changes that show the effectiveness of treatment or any further mutations of the patient's cancer cells.

[0014] Cancer therapies are most often dependent on single mutations, genes and proteins. As the effectiveness of one therapy wears off, another is prescribed. Two shortcomings in this approach are that no one therapy targets enough of the cancer cells to eradicate the disease, and each cancer subject has a unique set of mutations or other abnormalities that prevent any one therapy from addressing the entire population of cancer patients.

[0015] It is desirable to have a robust cancer therapy that addresses each cancer subject individually, then exhibits enough potency to kill all or most of the individual's cancer cells without affecting their healthy cells. To accomplish this, one must be able to profile the genetic, mutational individuality of a cancer subject, then quickly react with an individualized drug to attack those cells that fit the identified profile.

### SUMMARY

[0016] Embodiments of present invention relate to short isolated nucleic acids at least 17 bases in length having specific sequences, called cancer detection reagents. Cancer detection reagents also include isolated nucleic acids having sequences complementary to any sequence disclosed in this specification. Embodiments of the invention also relate to methods of using these nucleic acids in cancer diagnostics, particularly pathology-based diagnostics. Other methods relate to anti-cancer uses of the cancer detection reagents, such as killing, inducing the body to kill, or hampering the growth of cancer cells, particularly by inducing the targeted death of cancer cells. While in many embodiments more than one cancer detection reagent will be used, in some embodiments the “cancer detection reagents” used may actually be only a single isolated nucleic acid. Further, “subject” as used in the current description may include an entire animal, such as a human, an organ, as tissue, a tumor, blood, a group of cells, or even an individual cell.

[0017] Cancer detection reagents, alone or in combination, may be used to determine the cancer profile of a subject. These cancer detection reagents may be used on a variety of samples from the subject, including traditional tumor biopsies as well as peripheral or other blood.

[0018] The cancer detection reagents may be used to detect cancer, determine the stage of cancer, or to monitor the process of the cancer or of its treatment. Additionally, testing with the cancer detection reagents may be used to provide a cancer profile showing several mutations or abnormalities present in one or more metastatic cancer cells within the subject. The presence or absence of particular cancer detection reagents or combinations of cancer detection reagents in a subject may indicate the that various therapeutics, including therapeutics including or based on the cancer detection reagents, should or should not be administered to a subject.

[0019] Anti-cancer uses of the cancer detection reagents may be selected based on diagnostic results, such as those described above. However, anti-cancer uses may also be used based on other clinical indications that are wholly or partially independent of the detection using the cancer detection reagents. Anti-cancer uses may include antibody treatment based on peptides encoded by the cancer detection reagents, or nucleic acid-based therapies.

[0020] Anti-cancer uses may be coupled with diagnostic monitoring to detect the appearance of new cancer detection reagents in a subject or the disappearance of old cancer detection reagents in the subject. Such appearances and disappearance may warrant corresponding changes in the cancer detection reagents or other therapeutics administered to the subject.

[0021] Anti-cancer uses may include inducing targeted cancer cell death in a subject. This induction of targeted cell death may occur in vitro or in vivo. Induction of targeted cell death in vitro may be part of a diagnostic method or a combined diagnostic and therapeutic method.

[0022] In a whole animal subject, anti-cancer methods may result in reduction of the size of one or more tumors, increased time for other anti-cancer agents to function, or destruction of cancer cells, particularly small numbers of cells such as those that might remain after surgery or form small metastases not detectable using conventional technologies. Even if tumors are not reachable by some treatments, metastatic cells in the blood may be destroyed, hampering future spread of the cancer.

[0023] Accordingly, certain embodiments of the invention may fulfill the following objects and present the following advantages:

[0024] construction of an individual, genetic cancer profile for a subject's cancer using only subject blood samples;

[0025] utilizing an individual, genetic cancer profile as a precursor for the prescription of existing cancer therapies;

[0026] utilizing an individual, genetic cancer profile to facilitate the development of new, individualized, cancer cell targeting therapies.

### BRIEF DESCRIPTION OF THE DRAWINGS

[0027] The present invention may be better understood through reference to the following detailed description taken in conjunction with the FIGUREs which illustrate various embodiments of the invention.

[0028] FIG. 1 illustrates a method of detecting a cancer detection reagent.

[0029] FIG. 2 illustrates correlation between individual cancer detection reagents and cancer types.

[0030] FIG. 3 illustrates a method for PCR Reduction using cancer detection reagents.

[0031] FIG. 4 illustrates a method of blood testing and cancer profiling.

### DETAILED DESCRIPTION

[0032] Embodiments of the present invention relate to cancer detection reagents made of short isolated nucleic acids having sequences corresponding to cancer-associated mutations. Cancer detection reagents may include both nucleic acids having a sequence identical to that of the mutant mRNA and the complementary sequence. However, both complementary nucleic acid strands are not required for all aspects of this invention. In some aspects, only one or the other of the complementary nucleic acids will be used. The appropriate nucleic acid strand to use as the specific cancer detection reagent for each application will be apparent to one skilled in the art.

[0033] These cancer detection reagents may be used in diagnosis of metastatic cancer, particularly pathology-based diagnosis, including initial diagnosis as well as treatment and disease progression monitoring, and also including monitoring of targeted cancer cell death.

[0034] The cancer detection reagent sequences were isolated using proprietary software and information from public databases recording genetic information about cancer and healthy cells and tissues. Specifically, using the proprietary software and supercomputers, random portions of mRNA data from cancer cell lines were compared to all the available mRNA data from all healthy cell lines, as diagramed in FIG. 1.

[0035] The resultant database is referred to as the cancer detection reagent sequence hyperset, which contains the sequences of hundreds of thousands of cancer detection reagents, of length 17mer or greater, grouped into supersets according to each cancer type. Each cancer detection reagent in a superset is found at least once in a cancer cell line corresponding to the superset's cancer type. There is redundancy among the supersets because cancer detection reagent sequences appear in supersets for many different cancer types.

[0036] The total number of cancer detection reagent sequences in the total cancer hyperset may increase. As new cancer arise, new cancer detection reagents may be created. Based on currently available data, it is known that a superset for a single type of cancer may contain tens of thousands of cancer detection reagents.

[0037] The cell lines used to isolate the mRNA molecules that contain the cancer detection reagents were derived from human subjects with cancer. Therefore it is possible to count these cell lines as past occurrences of the cancer detection reagents in humans. This yields a simple method for ranking the likelihood of occurrence of each cancer detection reagent based on its past rate of occurrence in cancer cell lines.

[0038] The cancer detection reagents are generally small and thus, unsuitable for genomic mapping. However, the mRNA molecules containing the unisolated cancer detection reagents can be mapped. In this manner, one may determine which genes are associated with each cancer detection reagent.

[0039] Many genes may be associated with each cancer detection reagent—the number of genes are normally in direct correlation to the number of unique mRNA molecules containing each cancer detection reagent. Sometimes, hundreds of mRNA molecules contain a cancer detection reagent, yielding many mapped genes. This is evident in TABLE 1.

[0040] TABLE 1 lists cancer detection reagents and some associated cancers as well as some other pertinent information, such as PCR annealing temperatures and gene/chromosome location information. These cancer detection reagents may include SNPs, but also include longer mutations suitable for diagnostic and targeted cancer cell death use.

[0041] While many of the cancer detection reagent sequences are located in genes with no currently known relevance to cancer, some are located in genes known to be important in cancer. These sequences often represent SNPs, cryptic splicing and other genetic defects.

[0042] Cancer detection reagents may be common to many genes and many cancers. This does not mean that every cancer detection reagent will exist in every cancer cell line or cancer subject.

[0043] Given the way public data is generated, one would expect much chance and coincidence in any commonality or lack thereof between the cancer detection reagents and cancer cell lines. Each cancer subject is expected to have mRNA containing a subset of cancer detection reagents constituting an individual cancer profile, and identifying which genes may be mutated in that individual. It is possible however, that with a large enough subject pool, the same cancer profile may be observed among different subjects, but nevertheless one does not expect every subject in the pool to have an identical cancer profile.

[0044] The extent of individualism in cancer is not clearly understood. However, individuality nevertheless appears to correlate with cancer type, as illustrated in FIG. 2. The cancer detection reagent hyperset may constitute all mRNA molecules of length 17mer or greater that are exclusive to cancer cells. Each cancer type then has a corresponding cancer detection reagent superset, and each cancer subject has a cancer detection reagent subset, which is synonymous to their individual cancer profile.

[0045] Because TABLE 1 presents a superset of cancer detection reagents, one should not expect to find all of them in a single cancer subject, although this is not impossible. Rather, the detection reagents of TABLE 1 or subcombinations thereof are useful in generating a cancer profile for a particular subject's cancer. By including a large number of cancer detection reagents, a more complete cancer profile may be developed. Additionally, knowledge of what detection reagent sequences are not present in subject's mRNA may also be very useful for diagnosis, including prognosis, as well as cancer progression and treatment monitoring. It may, for example, be useful in selecting a treatment for the subject.

[0046] In various embodiments, a cancer profile may be generated using 1 or more, 5 or more, 10 or more, 20 or more, 50 or more, 100 or more, 500 or more, or 1000 or more distinct cancer detection reagents. The cancer detection reagents used in generating the profile may be selected on based on particular criteria, such as overall frequency of occurrence in cancers or previous occurrence in a particular type of cancer.

[0047] The cancer detection reagents may be used to test the tumor or blood tissue of actual patients. For example, tests may be performed using PCR, microarray or chip technology. Once the cancer detection reagents are found to be present in the patient, those reagents may be selected to treat the patient or to otherwise guide treatment.

[0048] PCR based analyses of samples provides a powerful and rapid means of detecting the presence of cancer detection reagents in a subject's cancer. PCR analyses using amplification primers based on cancer detection reagents enables analysis with small amounts of starting material and enables simultaneous detection of multiple cancer detection reagents. Linear PCR amplification using a single PCR primer based on cancer detection reagents sequences permit quantification of gene expression levels.

[0049] Traditional PCR amplifies a set regions of nucleic acid located between the 5′ and 3′ primers. Because both 5′ and 3′ primers are used, the newly created nucleic acid strand becomes available as a template in the next cycle. All primers and PCR conditions are not equally effective at amplification, thus some create new templates at a higher rate than other primers. The effect combined with the ability of new strands to serve as templates results in significant differences in the number of individual nucleic acid strands having the amplified sequence when different primers are used. This difference is related to primer and PCR-condition efficiency rather than the actual number of template strands that were available in the original sample.

[0050] A more accurate comparison of the numbers of mRNA molecules containing different cancer detection reagent sequences in a given sample may be obtained using a modified type of PCR herein referred to as “PCR Reduction”. Using this methodology, only 5′ primers are provided. These are able to hybridize with the original template nucleic acid, but not with any strands produced as part of the PCR process because such strands contain sequences identical to, but not complementary to the 5′ primer. Because only the original template nucleic acid may serve as a template for the PCR reaction, differences in copy number of different cancer detection reagent sequences due to primer or PCR efficiency are not so pronounced. Copy number has a much closer correlation with actual number of original templates.

[0051] In PCR Reduction, polymerization occurs until the polymerase falls off of the template strand. This tends to leave a trailing end after the 5′ primer. These trailing ends vary somewhat in length, but normally all terminate within several hindered base pairs of the primer. Thus, all of the PCR reaction products may be resolved via electrophoresis on a gel as a single, but slightly blurry band. One example PCR Reduction methodology is illustrated in FIG. 3.

[0052] Although amplification of the cancer detection reagents alone might be useful in some embodiments of the invention, in the PCR reduction technique described above the tailing end allows for easy gel-based detection that could not be easily achieved using the small cancer detection reagents alone. If there is no cancer detection reagent sequence present in the sample, then the primers have no template and no band shows up at the expected location after electrophoresis. On the other hand, if the cancer detection reagent sequences are present, a blurry band is present. The intensity of this band may be analyzed using conventional techniques to estimate the relative abundance of templates in the sample containing each detection reagent sequence.

[0053] Cancer tissue samples and biopsies usually come from a single tumor, even when multiple tumors are present. In the early stages of cancer most cancer cells are daughters of a parent tumor and often have the same mutations as the cells in the tumor. However, metastatic cancer cells often have different mutations. Further, metastatic tumors, even if initially similar, follow different development pathways and may accumulate different additional mutation over time. Finally, it is well known that many cancer treatments cause further mutations in cancer cells. Therefore, cancer cells in later stages of cancer often do not have the same mutations as those in early stages. Variation in mutations is also often seen among metastatic tumors in the same individual.

[0054] Because tumors tend to have individual mutations, it follows that a subject tissue sample taken from a single tumor will likely not contain all the cancer mutations throughout a subject's cancer. A profile of all or most mutations in the subject's body using traditional methodologies thus often requires samples from multiple tumors. In contrast, in embodiments of this invention using blood as a sample, all or most of the mutations may be detected in a single sample because it contains cells from multiple tumors. Further a blood sample may even contain cells from small metastatic tumors not detectable using conventional techniques.

[0055] Cancer detection reagents of the present invention may be generally designed to detect mutations that are exclusive to cancer cells, not specific tumors. It has been shown that the cancer detection reagents can detect cancer mutations in cells circulating in the blood. So, one would expect PCR Reduction tests between a tumor tissue sample and a blood sample from the same subject to show an increased number of mutations in the blood. In fact, any cancer profile from a tissue sample alone may be inferior to a blood sample because the tissue cancer profile is actually a profile for the single, biopsied tumor, and not the subject's cancer in general.

[0056] Cancer detection reagents represent a special kind of cancer mutation—one that has nucleic acid content exclusive to cancer cells. If such exclusivity were not present, the mutation would not be considered a cancer detection reagent, as shown in FIG. 1. This condition in selecting cancer detection reagents produces reagents that detect useful differences in the genetics of cancer cells. Without such differences, it is difficult or not possible to target the cancer cells while avoiding healthy cells. This is an important criteria for diagnosing and treating cancer.

[0057] Cancer profiles may be created for other subjects using a blood sample and the methodologies described herein.

[0058] FIG. 4 illustrates steps for one such exemplary methodology. In most instances, a cancer profile may be obtained within a few hours to a few days after obtaining a blood sample from a subject.

[0059] Because most cancer detection reagents are associated with a group of genes, one may quickly determine which group of genes are mutating in a subject's cancer in a way that is exclusive to cancer cells. Any subsequent therapy can utilize this genetic information for specific cancer cell targeting. Unfortunately, most existing therapies do not have this kind of targeting capacity. Therefore, the blood tests of the present invention may also be precursory tests for new therapeutics that can use the cancer detection reagents for specific cancer cell targeting.

[0060] In a non-limiting embodiment of the invention, the cancer detection reagent may be an antisense oligonucleotide sequence. The antisense sequence may be complementary to at least a portion of the 5′ untranslated, 3′ untranslated or coding sequence of one or several genes in a cancer cell's transcriptome. An oligonucleotide sequence corresponding to the cancer detection reagent may be of sufficient length to specifically interact (hybridize) with the target sequence but not so long that the oligonucleotide is unable to discriminate a single based difference. For example, for specificity the oligonucleotide may be at least six nucleotides in length. Longer sequences can also be used. In a particular embodiment the cancer detection reagent may be 17 nucleotides in length. The maximum length of the sequence will depend on maintaining its hybridization specificity, which depends in turn on the G-C content of the agent, melting temperature (Tm) and other factors, and can be readily determined by calculation or experiment e.g., stringent conditions for detecting hybridization of nucleic acid molecules as set forth in “Current Protocols in Molecular Biology”, Volume I, Ausubel et al., eds. John Wiley: New York N.Y., pp. 2.10.1-2.10.16, first published in 1989 but with annual updating) or by utilization of free software such Osprey (Nucleic Acids Research 32(17):e133) or EMBOSS (http://www.uk.embnet.org/Software/EMBOSS).

[0061] Embodiments of the present invention provide for the diagnosis of cancer in subjects including but not limited to humans, domestic pets including but not limited to cats, dogs, hamsters, etc., sport and farm animals including but not limited to horses, cattle, sheep etc. Embodiments of the present invention further provide for utilization of cancer detection reagents in material derived from isolated cells or a sample isolated from a subject in need analysis of disease-state diagnosis. Additional embodiments of the invention include utilization of cancer detection reagents in intact cells or tissues for in situ detection and diagnosis.

[0062] Detection of expression of a specific gene under in situ conditions using oligonucleotide probes is well known in the art. Classically oligonucleotide probes have been either 5′ or 3′ end-labeled or 3′ tailed with modified nucleotides that have a “label” attached that can be detected after the probe has hybridized to its target. With end-labeling a single modified ddNTP (that incorporates the label) is added to either the 5′ or the 3′ end of the molecule enzymatically or during probe synthesis. 3′ tailing involves addition of a tail (on average 5-50 nucleotides long of modified dNTPs depending on the method used) using the enzyme terminal transferase (TdT). On the other hand several non-radioactive labels have been used successfully with in situ hybridization include Biotin, digoxin and digoxigenin (DIG), alkaline phosphatase and the fluorescent labels, fluorescein (FITC), Texas Red and rhodamine. The present invention encompasses all the aforementioned methods of probe labeling and detection by in situ hybridization.

[0063] A cancer detection reagent may be a DNA or a RNA molecule, or any modification or combination thereof. A cancer detection reagent may contain inter-nucleotide linkages other than phosphodiester bonds, such as phosphorothioate, methylphosphonate, methylphosphodiester, phosphorodithioate, phosphoramidate, phosphotriester, or phosphate ester linkages, resulting in increased stability. Oligonucleotide stability may also be increased by incorporating 3′-deoxythymidine or 2′-substituted nucleotides (substituted with, e.g., alkyl groups) into the oligonucleotides during synthesis or by providing the oligonucleotides as phenylisourea derivatives, or by having other molecules, such as aminoacridine or poly-lysine, linked to the 3′ ends of the oligonucleotides. Modifications of the RNA and/or DNA nucleotides comprising a cancer detection reagent of the invention may be present throughout the oligonucleotide or in selected regions of the oligonucleotide, e.g., the 5′ and/or 3′ ends.

[0064] The cancer detection reagents can be made by any method known in the art, including standard chemical synthesis, ligation of constituent oligonucleotides, and transcription of DNA encoding the oligonucleotides.

[0065] The present invention in one embodiment provides for the screening of biological tissue that is to be transferred from a member of one animal species to another, including but not limited to one human subject to another. Non-limiting examples of such biological tissue include blood, plasma, skin, bone marrow and major organs such as heart, liver lung, kidney etc. Some embodiments provide for testing a blood or tissue sample for the presence of malignant cells before transfer to another individual. At present many tests are performed on biological material prior to transfusion or transplantation. These tests are performed to ensure pathogen-free material and/or for tissue compatibility. Whether donor tissue contains cells with malignant potential or overtly malignant cells from an undetected cancer has not been of significant concern. The general consensus is that malignant cells from a donor with cancer will not cause transfer of disease to the recipient due to graft rejection. This notion has been recently challenged and there is accumulating evidence of malignancy being transferred between individuals (Dingli and Nowak, 2006 Nature 433:35-36 and references cited therein). The potential for transfer is also enhanced by the use of immunosuppressive drugs in conjunction with organ transplant. Thus, testing biological material for malignant potential is needed. Testing for the presence of malignant cells is limited by the lack of availability of quick and reliable screens which simultaneously test for the presence of multiple markers and that may be performed with a small amount of test material. Embodiments of the present invention provide a way to perform tests for the presence of small amounts of malignant cells in blood or other tissue or organ samples. Testing of candidate donor material may be done by any one of several methods known in the art, non-limiting examples of which are described in the sections above. Methods utilizing cancer detection reagents of the present invention to determine whether donor material contains malignant cells include but are not limited to methods such as PCR, microarray analyses, in situ hybridization etc. In particular embodiments, testing may be used to screen blood in blood banks.

[0066] The cancer detection reagents of the present invention may be used for a variety of anti-cancer applications in which they kill cancer cells, induce the body to kill cancer cells, or inhibit growth of cancer cells. These effects may be achieved by the cancer detection reagents along, in combination with one another, or in combination with other therapeutics.

[0067] For example, the cancer detection reagents may be used to induce targeted cell death of cancer cells in a variety of ways. First, if they correlate with information known or later developed regarding existing or novel cancer treatments, such as chemotherapy or radiation, they may be used to direct which of these treatments to employ for a subject.

[0068] However, the detection reagents of the present invention may also be used to develop novel agents that target the detection reagent nucleic acid sequences or peptides that they encode. These novel agents may be used to induce targeted cancer cell death.

[0069] Because the cancer detection reagents of the present invention are absent in the healthy cell transcriptome, they represent cancer-specific targets for inducing cancer cell death.

[0070] For example, although some cancer detection reagents may be translated into peptides located primarily within the cell, some are embedded in sequences that normally encode extracellular or membrane proteins. Such sequences are readily known to the art and are considered predictive of the likely cellular location of a protein and portions of it. Accordingly, particularly for proteins with extracellular regions, administration of an antibody specific for a peptide encoded by a cancer detection reagent is expected to induce cell death. Because only cancer cells exhibit these peptides, only cancer cells are targeted and killed by the antibodies.

[0071] Antibodies used in conjunction with the present invention may include monoclonal and polyclonal antibodies, non-human, human, and humanized antibodies and any functional fragments thereof.

[0072] In addition to protein-based treatments, the cancer detection reagent sequences of the present invention present a particularly promising target for mRNA-based or other nucleic acid-based intervention. Because the cancer detection reagents were isolated through comparison with the transcriptome of a healthy cell, mRNA-based treatments should have no effect on healthy cells because they will lack any mRNA affected by the treatment.

[0073] Specifically, mRNA-based treatments may be implemented using nucleic acids including the cancer detection reagent sequences. It is now well known that when mRNA is bound by a complementary nucleic acid within a cell, various cellular mechanisms may then prevent that mRNA from being transcribed into protein. Some of these mechanisms, such as antisense-based mechanisms, appear to rely upon repeated binding of complementary strands to mRNA. Other mechanisms, such as siRNA or RNAi, appear to induce much more long-lasting changes that will prevent translation of the targeted mRNA even from unaltered, single-stranded versions.

[0074] In a particular embodiment of the invention, siRNA is created by transcription of plasmid DNA in the cancer cell. The plasmid may be created to allow this transcription activity using a selected cancer detection reagent. A pool of plasmids directed to several cancer detection reagents present in a subject's cancer profile may also be created. After creation of the plasmids, they may be placed in a transfection medium suitable for delivery to cancer cells. It is known that some cells will take up and express bare plasmids. However, a delivery vehicle such as a liposome or deleted viral vector may also be used. Because the plasmids are not expected to have any effect on normal, healthy cells, targeted delivery is not required. It is possible, in some embodiments of the invention, to include additional agents that increase the effectiveness of the delivery vehicle, for example by increasing its diffusion into tissue.

[0075] The plasmid as formulated for delivery may then be tested against blood from the cancer subject. Plasmids that function properly should kill cancer cells in the blood in a targeted manner. This activity is readily verifiable though analysis of mRNA in the blood (after a sufficient period of time to allow for degradation of mRNA already produced in the cancer cells before their death, normally less than 1 hour). Lack of damage to normal cells may be verified through visual and other analysis.

[0076] Testing in an animal model, such as a primate, may also verify that healthy cells are not affected by the plasmids. Plasmid markers or the cancer detection reagent itself may help verify cellular uptake and/or transcription in vivo.

[0077] Plasmids selected for delivery to cancer cells in a subject may then be formulated in a pharmaceutically acceptable manner and administered to the subject. Such administration may include injection into a tumor or injection into the blood stream. Delivery methods may be influenced by the type and location of the cancer as well as other needs of the subject and the formulation of the plasmid agent.

[0078] Although a single cancer detection reagent may be used to target multiple genes or gene products in the methods of inducing cancer cell death of the present invention, in some embodiments multiple cancer detection reagents may be targeted to produce an potent effect. Combined agents targeting more than one cancer detection reagent may also be particularly useful if administered to a subject with multiple tumors. The subject's tumors may have differentiated such that every tumor does not contain any one cancer detection reagent sequence. Incorporating agents targeted to multiple cancer detection reagent sequences may allow these differentiated cancer cells to be killed more effectively. Such combined approaches may be particularly powerful against new or small tumors that may not be detected using conventional methods, but nevertheless contain a cancer detection reagent sequence detectable when diagnostic methods of the present invention are used to create a cancer profile.

[0079] Thus, targeted cancer cell death may be accomplished using selected methods of the present invention according to a three-step method. First, a cancer profile may be created for the subject. Second, a targeted cancer cell death agent may be created and tested on the subject's blood or other tissue sample. Third, the agent may be administered to the subject to cause targeted death of cancer cells in that subject. This process may be accomplished in as little as three weeks.

[0080] Continued monitoring may allow detection of the disappearance of any cancer detection reagents in the subject as well as the appearance of any new ones. The agent or combination of agents administered to the subject may then be changed accordingly.

[0081] Table 1 includes cancer detection reagent sequences. Cancer detection reagents may also have sequences complementary to those on Table 1. The cancer detection sequences listed in Table 1 represent reverse complement strands. The sequences listed in Table 1 were selected based on occurrence in cancers overall or rate of occurrence in genes. Incidence (“In.”) indicates the number of times the sequence was located in individual cancers. Each sequence is associated with an identifier corresponding to at least one cancer type in which it has been found. Other types of cancer, the gene or chromosome, and library from which the cancer detection reagent was isolated are also indicated for some sequences. The predicted melting temperature (Tm) is also included for some sequences.

LENGTHY TABLE REFERENCED HERE
US20080026047A1-20080131-T00001
Please refer to the end of the specification for access instructions.

[0082] While embodiments of this disclosure have been depicted, described, and are defined by reference to specific example embodiments of the disclosure, such references do not imply a limitation on the disclosure, and no such limitation is to be inferred. The subject matter disclosed is capable of considerable modification, alteration, and equivalents in form and function, as will occur to those ordinarily skilled in the pertinent art and having the benefit of this disclosure. The depicted and described embodiments of this disclosure are examples only, and are not exhaustive of the scope of the disclosure.

LENGTHY TABLE
The patent application contains a lengthy table section. A copy of the table is available in electronic form from the USPTO web site (http://seqdata.uspto.gov/?pageRequest=docDetail&DocID=US20080026047A1). An electronic copy of the table will also be available from the USPTO upon request and payment of the fee set forth in 37 CFR 1.19(b)(3).

The application's sequence listing, which the Patent Office published only in electronic form, follows.

SEQUENCE LISTING (3700 sequences)

SEQ ID NO: 1 - DNA, 18 bp, Homo sapiens
tacgggtgactgtgccat

SEQ ID NO: 2 - DNA, 17 bp, Homo sapiens
aaatgcatcaaagttgc

SEQ ID NO: 3 - DNA, 17 bp, Homo sapiens
gcaggtcagttccacca

SEQ ID NO: 4 - DNA, 17 bp, Homo sapiens
tgtgatgagctgtctca

SEQ ID NO: 5 - DNA, 17 bp, Homo sapiens
gttgttaggatccagtc

SEQ ID NO: 6 - DNA, 17 bp, Homo sapiens
tgttagatcagtccaga

SEQ ID NO: 7 - DNA, 17 bp, Homo sapiens
actcctataggaacttg

SEQ ID NO: 8 - DNA, 17 bp, Homo sapiens
atcacgccaacagtttc

SEQ ID NO: 9 - DNA, 20 bp, Homo sapiens
caggtctcccgtttctgctc

SEQ ID NO: 10 - DNA, 17 bp, Homo sapiens
cccaaaggaacatccag

SEQ ID NO: 11 - DNA, 18 bp, Homo sapiens
gagataaccggtggcata

SEQ ID NO: 12 - DNA, 17 bp, Homo sapiens
cggatgtccctgctggg

SEQ ID NO: 13 - DNA, 19 bp, Homo sapiens
taccagtcgcaggttcagc

SEQ ID NO: 14 - DNA, 17 bp, Homo sapiens
aacacccagcctcgtac

SEQ ID NO: 15 - DNA, 17 bp, Homo sapiens
acccagcctcgtaccta

SEQ ID NO: 16 - DNA, 19 bp, Homo sapiens
acccagcctcgtactagcc

SEQ ID NO: 17 - DNA, 19 bp, Homo sapiens
cacccagcctcgtacctag

SEQ ID NO: 18 - DNA, 17 bp, Homo sapiens
catcatattgcaggttt

SEQ ID NO: 19 - DNA, 17 bp, Homo sapiens
ccactttgcgccacagg

SEQ ID NO: 20 - DNA, 17 bp, Homo sapiens
ggcatgctctgcgggtc

SEQ ID NO: 21 - DNA, 17 bp, Homo sapiens
gtctgctcccccatcac

SEQ ID NO: 22 - DNA, 17 bp, Homo sapiens
gtgttagaatccagtcc

SEQ ID NO: 23 - DNA, 17 bp, Homo sapiens
taacccagtttatggca

SEQ ID NO: 24 - DNA, 17 bp, Homo sapiens
tcatcatcagatcatca

SEQ ID NO: 25 - DNA, 17 bp, Homo sapiens
tccggcacagtcttggt

SEQ ID NO: 26 - DNA, 17 bp, Homo sapiens
tttccagcaaggagata

SEQ ID NO: 27 - DNA, 20 bp, Homo sapiens
aaacccagcctcgtacctag

SEQ ID NO: 28 - DNA, 18 bp, Homo sapiens
aaatcgagtttctacgac

SEQ ID NO: 29 - DNA, 22 bp, Homo sapiens
aacacccagcctcgtacctagc

SEQ ID NO: 30 - DNA, 25 bp, Homo sapiens
aacacccagcctcgtacctagccta

SEQ ID NO: 31 - DNA, 19 bp, Homo sapiens
aacacccggcctcgtacct

SEQ ID NO: 32 - DNA, 20 bp, Homo sapiens
acacccagcctcgtacctag

SEQ ID NO: 33 - DNA, 22 bp, Homo sapiens
acacccagcctcgtacctagcc

SEQ ID NO: 34 - DNA, 23 bp, Homo sapiens
acacccagcctcgtacctagcct

SEQ ID NO: 35 - DNA, 24 bp, Homo sapiens
acacccagcctcgtacctagccta

SEQ ID NO: 36 - DNA, 19 bp, Homo sapiens
acacccagcctcgtactag

SEQ ID NO: 37 - DNA, 21 bp, Homo sapiens
acacccggcctcgtacctagc

SEQ ID NO: 38 - DNA, 17 bp, Homo sapiens
acagttggtacccatct

SEQ ID NO: 39 - DNA, 20 bp, Homo sapiens
acccagcctcgtacctagcc

SEQ ID NO: 40 - DNA, 21 bp, Homo sapiens
acccagcctcgtacctagccg

SEQ ID NO: 41 - DNA, 21 bp, Homo sapiens
acccagcctcgtacctagcct

SEQ ID NO: 42 - DNA, 17 bp, Homo sapiens
acccaggcctcgcgtcc

SEQ ID NO: 43 - DNA, 19 bp, Homo sapiens
acccggcctcgtacctagc

SEQ ID NO: 44 - DNA, 18 bp, Homo sapiens
agaagagtttgttctcat

SEQ ID NO: 45 - DNA, 18 bp, Homo sapiens
agcctcgtacctagccgt

SEQ ID NO: 46 - DNA, 19 bp, Homo sapiens
agcctcgtacctagccgtt

SEQ ID NO: 47 - DNA, 18 bp, Homo sapiens
aggcctcgtacctagcct

SEQ ID NO: 48 - DNA, 17 bp, Homo sapiens
attcacaccagcctcgt

SEQ ID NO: 49 - DNA, 17 bp, Homo sapiens
cacacccagcctcgtac

SEQ ID NO: 50 - DNA, 21 bp, Homo sapiens
cacacccagcctcgtacctag

SEQ ID NO: 51 - DNA, 22 bp, Homo sapiens
cacacccagcctcgtacctagc

SEQ ID NO: 52 - DNA, 23 bp, Homo sapiens
cacacccagcctcgtacctagcc

SEQ ID NO: 53 - DNA, 20 bp, Homo sapiens
caccagcctcgtacctagcc

SEQ ID NO: 54 - DNA, 21 bp, Homo sapiens
cacccagcctcgtacctagcc

SEQ ID NO: 55 - DNA, 23 bp, Homo sapiens
cacccagcctcgtacctagccta

SEQ ID NO: 56 - DNA, 22 bp, Homo sapiens
cacccggcctcgtacctagcct

SEQ ID NO: 57 - DNA, 17 bp, Homo sapiens
cagcctcgtacctagcc

SEQ ID NO: 58 - DNA, 20 bp, Homo sapiens
cagcctcgtacctagccgtt

SEQ ID NO: 59 - DNA, 18 bp, Homo sapiens
cagcctcgtacctagcct

SEQ ID NO: 60 - DNA, 19 bp, Homo sapiens
cagcctcgtacctagccta

SEQ ID NO: 61 - DNA, 18 bp, Homo sapiens
caggcctcgtacctagcc

SEQ ID NO: 62 - DNA, 17 bp, Homo sapiens
catccccagggaaggaa

SEQ ID NO: 63 - DNA, 18 bp, Homo sapiens
ccagcctcgtacctagcc

SEQ ID NO: 64 - DNA, 21 bp, Homo sapiens
ccagcctcgtacctagccgtt

SEQ ID NO: 65 - DNA, 21 bp, Homo sapiens
ccagcctcgtacctagcctat

SEQ ID NO: 66 - DNA, 18 bp, Homo sapiens
cccagcctcgtacctagc

SEQ ID NO: 67 - DNA, 19 bp, Homo sapiens
cccagcctcgtacctagcc

SEQ ID NO: 68 - DNA, 21 bp, Homo sapiens
cccagcctcgtacctagccta

SEQ ID NO: 69 - DNA, 23 bp, Homo sapiens
ccccaacaccccgctcgaaggcc

SEQ ID NO: 70 - DNA, 22 bp, Homo sapiens
cccggcctcgtacctagccgta

SEQ ID NO: 71 - DNA, 17 bp, Homo sapiens
cctcggccgattaacac

SEQ ID NO: 72 - DNA, 18 bp, Homo sapiens
cctcggccgattaacacc

SEQ ID NO: 73 - DNA, 22 bp, Homo sapiens
cctcggccgattaacaccagcc

SEQ ID NO: 74 - DNA, 19 bp, Homo sapiens
cctcggccgattaacaccc

SEQ ID NO: 75 - DNA, 23 bp, Homo sapiens
cctcggccgattaacacccagcc

SEQ ID NO: 76 - DNA, 20 bp, Homo sapiens
cctcggccgattaacacccg

SEQ ID NO: 77 - DNA, 21 bp, Homo sapiens
cctcggccgattaacacccgg

SEQ ID NO: 78 - DNA, 18 bp, Homo sapiens
cctcggccgattacaccc

SEQ ID NO: 79 - DNA, 17 bp, Homo sapiens
cctcggccgattaccac

SEQ ID NO: 80 - DNA, 17 bp, Homo sapiens
cctcggccgattcaacc

SEQ ID NO: 81 - DNA, 18 bp, Homo sapiens
cctcggccgattcaaccc

SEQ ID NO: 82 - DNA, 18 bp, Homo sapiens
cctcggccgattcacacc

SEQ ID NO: 83 - DNA, 20 bp, Homo sapiens
cctcggccgattcacaccag

SEQ ID NO: 84 - DNA, 19 bp, Homo sapiens
cctcggccgattcacaccc

SEQ ID NO: 85 - DNA, 22 bp, Homo sapiens
cctcggccgattcacacccagc

SEQ ID NO: 86 - DNA, 23 bp, Homo sapiens
cctcggccgattcacacccagcc

SEQ ID NO: 87 - DNA, 24 bp, Homo sapiens
cctcggccgattcacacccagcct

SEQ ID NO: 88 - DNA, 20 bp, Homo sapiens
cctcggccgattcacacccg

SEQ ID NO: 89 - DNA, 18 bp, Homo sapiens
cctcggccgattcaccac

SEQ ID NO: 90 - DNA, 17 bp, Homo sapiens
cctcggccgattcaccc

SEQ ID NO: 91 - DNA, 19 bp, Homo sapiens
cctcggccgattcaccccc

SEQ ID NO: 92 - DNA, 17 bp, Homo sapiens
cctcgtacctagccgtt

SEQ ID NO: 93 - DNA, 17 bp, Homo sapiens
cctcgtacctagcctat

SEQ ID NO: 94 - DNA, 19 bp, Homo sapiens
cggccgattaacaccagcc

SEQ ID NO: 95 - DNA, 17 bp, Homo sapiens
cggcctcgtacctagcc

SEQ ID NO: 96 - DNA, 21 bp, Homo sapiens
ctcggccgattcacaccagcc

SEQ ID NO: 97 - DNA, 23 bp, Homo sapiens
ctcggccgattcacacccagcct

SEQ ID NO: 98 - DNA, 17 bp, Homo sapiens
cttttagttggtctcgc

SEQ ID NO: 99 - DNA, 17 bp, Homo sapiens
gccctcggccgattaac

SEQ ID NO: 100 - DNA, 19 bp, Homo sapiens
gccgattcacacccagcct

SEQ ID NO: 101 - DNA, 18 bp, Homo sapiens
gcctcgtacctagccgta

SEQ ID NO: 102 - DNA, 18 bp, Homo sapiens
gcctcgtacctagccgtt

SEQ ID NO: 103 - DNA, 17 bp, Homo sapiens
gcctcgtacctagccta

SEQ ID NO: 104 - DNA, 19 bp, Homo sapiens
gcgtctggtctcctcgctg

SEQ ID NO: 105 - DNA, 18 bp, Homo sapiens
gcttcttaggcaccaggt

SEQ ID NO: 106 - DNA, 18 bp, Homo sapiens
ggacggctccagagtgcc

SEQ ID NO: 107 - DNA, 20 bp, Homo sapiens
ggccgattaacacccagcct

SEQ ID NO: 108 - DNA, 18 bp, Homo sapiens
ggccgattcacaccagcc

SEQ ID NO: 109 - DNA, 18 bp, Homo sapiens
ggcctcgtacctagccgt

SEQ ID NO: 110 - DNA, 19 bp, Homo sapiens
ggcctcgtacctagccgta

SEQ ID NO: 111 - DNA, 17 bp, Homo sapiens
ggcctcgtacctagcct

SEQ ID NO: 112 - DNA, 18 bp, Homo sapiens
ggcctcgtacctagccta

SEQ ID NO: 113 - DNA, 18 bp, Homo sapiens
gggcatgctctgcgggtc

SEQ ID NO: 114 - DNA, 17 bp, Homo sapiens
gtcccattcacccctga

SEQ ID NO: 115 - DNA, 17 bp, Homo sapiens
gtccgcgacgcgtgggt

SEQ ID NO: 116 - DNA, 17 bp, Homo sapiens
gtgatcttgaagaaact

SEQ ID NO: 117 - DNA, 23 bp, Homo sapiens
taacacccagcctcgtacctagc

SEQ ID NO: 118 - DNA, 24 bp, Homo sapiens
taacacccagcctcgtacctagcc

SEQ ID NO: 119 - DNA, 25 bp, Homo sapiens
taacacccagcctcgtacctagcct

SEQ ID NO: 120 - DNA, 17 bp, Homo sapiens
tccagagttcgggtcag

SEQ ID NO: 121 - DNA, 17 bp, Homo sapiens
tccattccagagcctca

SEQ ID NO: 122 - DNA, 17 bp, Homo sapiens
tccgcgacgcgtgggtc

SEQ ID NO: 123 - DNA, 20 bp, Homo sapiens
tcggccgattaacacccggc

SEQ ID NO: 124 - DNA, 17 bp, Homo sapiens
tcggccgattaacaccg

SEQ ID NO: 125 - DNA, 20 bp, Homo sapiens
tcggccgattcacaccagcc

SEQ ID NO: 126 - DNA, 18 bp, Homo sapiens
tcggccgattcacaccca

SEQ ID NO: 127 - DNA, 18 bp, Homo sapiens
tcggccgattcacacccg

SEQ ID NO: 128 - DNA, 17 bp, Homo sapiens
tttagtggccagttctt

SEQ ID NO: 129 - DNA, 18 bp, Homo sapiens
agcctcgtacctagccta

SEQ ID NO: 130 - DNA, 17 bp, Homo sapiens
cctcgtacctagccgta

SEQ ID NO: 131 - DNA, 17 bp, Homo sapiens
gcctcgtacctagcctt

SEQ ID NO: 132 - DNA, 17 bp, Homo sapiens
aaatgtagtagcgatgg

SEQ ID NO: 133 - DNA, 17 bp, Homo sapiens
acacccggcctcgtact

SEQ ID NO: 134 - DNA, 17 bp, Homo sapiens
acatcacggatgtaagc

SEQ ID NO: 135 - DNA, 19 bp, Homo sapiens
accacccagcctcgtacct

SEQ ID NO: 136 - DNA, 17 bp, Homo sapiens
accatgtgaacaagttc

SEQ ID NO: 137 - DNA, 20 bp, Homo sapiens
acccagcctcgcacctagcc

SEQ ID NO: 138 - DNA, 20 bp, Homo sapiens
acccagcctcgtacctagac

SEQ ID NO: 139 - DNA, 22 bp, Homo sapiens
accccagcctcgtacctagccg

SEQ ID NO: 140 - DNA, 20 bp, Homo sapiens
agagccccccgccatcacgc

SEQ ID NO: 141 - DNA, 17 bp, Homo sapiens
agccgacccacgcgtcc

SEQ ID NO: 142 - DNA, 17 bp, Homo sapiens
agcctcgtacctagccc

SEQ ID NO: 143 - DNA, 19 bp, Homo sapiens
agcctcgtacctagccgta

SEQ ID NO: 144 - DNA, 19 bp, Homo sapiens
agcctcgtacctagcctaa

SEQ ID NO: 145 - DNA, 22 bp, Homo sapiens
agcctcgtacctagcctaagtt

SEQ ID NO: 146 - DNA, 19 bp, Homo sapiens
agcctcgtacctagcctag

SEQ ID NO: 147 - DNA, 17 bp, Homo sapiens
agcctcgtactagccta

SEQ ID NO: 148 - DNA, 19 bp, Homo sapiens
aggcctcgtacctagccta

SEQ ID NO: 149 - DNA, 19 bp, Homo sapiens
aggcctcgtacctagcctt

SEQ ID NO: 150 - DNA, 18 bp, Homo sapiens
atctccgtgctcgaagtc

SEQ ID NO: 151 - DNA, 18 bp, Homo sapiens
atgaggcggtaccagcac

SEQ ID NO: 152 - DNA, 17 bp, Homo sapiens
atggcctcccaggagta

SEQ ID NO: 153 - DNA, 23 bp, Homo sapiens
caaacccagcctcgtacctagcc

SEQ ID NO: 154 - DNA, 24 bp, Homo sapiens
caacacccagcctcgtacctagcc

SEQ ID NO: 155 - DNA, 24 bp, Homo sapiens
cacccagcctcgtacctagcctaa

SEQ ID NO: 156 - DNA, 23 bp, Homo sapiens
cacccggcctcgtacctagccta

SEQ ID NO: 157 - DNA, 18 bp, Homo sapiens
cagcctcgcacctagcct

SEQ ID NO: 158 - DNA, 18 bp, Homo sapiens
cagcctcgctacctagcc

SEQ ID NO: 159 - DNA, 18 bp, Homo sapiens
cagcctcgtacctagcca

SEQ ID NO: 160 - DNA, 19 bp, Homo sapiens
cagcctcgtacctagccga

SEQ ID NO: 161 - DNA, 20 bp, Homo sapiens
cagcctcgtacctagccgta

SEQ ID NO: 162 - DNA, 20 bp, Homo sapiens
caggcctcgtacctagccta

SEQ ID NO: 163 - DNA, 17 bp, Homo sapiens
cagtccagagcttcaac

SEQ ID NO: 164 - DNA, 21 bp, Homo sapiens
ccagcctcgtacctagccgta

SEQ ID NO: 165 - DNA, 24 bp, Homo sapiens
ccagcctcgtacctagcctaagtt

SEQ ID NO: 166 - DNA, 23 bp, Homo sapiens
ccagcctcgtacctagcctaatt

SEQ ID NO: 167 - DNA, 19 bp, Homo sapiens
ccagcctcgtactagccta

SEQ ID NO: 168 - DNA, 21 bp, Homo sapiens
ccaggcctcgtacctagccta

SEQ ID NO: 169 - DNA, 21 bp, Homo sapiens
ccaggcctcgtacctagcctt

SEQ ID NO: 170 - DNA, 22 bp, Homo sapiens
cccagcctcgtacctagccgtt

SEQ ID NO: 171 - DNA, 25 bp, Homo sapiens
cccagcctcgtacctagcctaagtt

SEQ ID NO: 172 - DNA, 26 bp, Homo sapiens
cccccaacccggtcatcctccaggac

SEQ ID NO: 173 - DNA, 18 bp, Homo sapiens
cccgcttgcgccgtttcc

SEQ ID NO: 174 - DNA, 19 bp, Homo sapiens
cccggtcatcctccaggac

SEQ ID NO: 175 - DNA, 21 bp, Homo sapiens
ccgattaacacccggcctcgt

SEQ ID NO: 176 - DNA, 17 bp, Homo sapiens
cctcggccgattaacca

SEQ ID NO: 177 - DNA, 19 bp, Homo sapiens
cctcggccgattcaaaccc

SEQ ID NO: 178 - DNA, 23 bp, Homo sapiens
cctcggccgattcaacacccagc

SEQ ID NO: 179 - DNA, 36 bp, Homo sapiens
cctcggccgattcaacacccagcctcgtacctagcc

SEQ ID NO: 180 - DNA, 18 bp, Homo sapiens
cctcggccgattcacccg

SEQ ID NO: 181 - DNA, 18 bp, Homo sapiens
cctcgtacctagccgtaa

SEQ ID NO: 182 - DNA, 19 bp, Homo sapiens
cctcgtacctagccgtagt

SEQ ID NO: 183 - DNA, 17 bp, Homo sapiens
cctcgtacctagcctta

SEQ ID NO: 184 - DNA, 17 bp, Homo sapiens
cgagcctcgtacctagc

SEQ ID NO: 185 - DNA, 19 bp, Homo sapiens
cgccacccagccctcgcta

SEQ ID NO: 186 - DNA, 19 bp, Homo sapiens
cggcctcgtacctagccta

SEQ ID NO: 187 - DNA, 17 bp, Homo sapiens
cgtacctagcctaagtt

SEQ ID NO: 188 - DNA, 23 bp, Homo sapiens
ctcggccgattaacacccggcct

SEQ ID NO: 189 - DNA, 17 bp, Homo sapiens
ctcggccgattaaccgc

SEQ ID NO: 190 - DNA, 17 bp, Homo sapiens
ctcggccgattaccccc

SEQ ID NO: 191 - DNA, 18 bp, Homo sapiens
gaaaatcgccacccaggc

SEQ ID NO: 192 - DNA, 18 bp, Homo sapiens
gaatggttctcgatgatg

SEQ ID NO: 193 - DNA, 17 bp, Homo sapiens
gacttcccgtcagctca

SEQ ID NO: 194 - DNA, 20 bp, Homo sapiens
gccgattcaaacccagcctc

SEQ ID NO: 195 - DNA, 23 bp, Homo sapiens
gccgattcaaacccagcctcgta

SEQ ID NO: 196 - DNA, 19 bp, Homo sapiens
gcctcgtacctagcctaag

SEQ ID NO: 197 - DNA, 19 bp, Homo sapiens
ggccgattcaacacccagc

SEQ ID NO: 198 - DNA, 17 bp, Homo sapiens
ggccgattcaccacccg

SEQ ID NO: 199 - DNA, 20 bp, Homo sapiens
ggcctcgtacctagccgtaa

SEQ ID NO: 200 - DNA, 17 bp, Homo sapiens
gtgggtccgacgcgtgg

SEQ ID NO: 201 - DNA, 25 bp, Homo sapiens
tcaacacccagcctcgtacctagcc

SEQ ID NO: 202 - DNA, 24 bp, Homo sapiens
tcacacccagcctcgtacctagcc

SEQ ID NO: 203 - DNA, 18 bp, Homo sapiens
tcggccgattcaccccca

SEQ ID NO: 204 - DNA, 17 bp, Homo sapiens
tcgtacctagccgtaag

SEQ ID NO: 205 - DNA, 18 bp, Homo sapiens
tcgtacctagcctaagtt

SEQ ID NO: 206 - DNA, 17 bp, Homo sapiens
tgagacgccacccaggc

SEQ ID NO: 207 - DNA, 17 bp, Homo sapiens
tggacgattggtgtaga

SEQ ID NO: 208 - DNA, 17 bp, Homo sapiens
tgttctatctgagctct

SEQ ID NO: 209 - DNA, 19 bp, Homo sapiens
cctcgtacctagcctaatt

SEQ ID NO: 210 - DNA, 18 bp, Homo sapiens
gcctcgtacctagcctta

SEQ ID NO: 211 - DNA, 17 bp, Homo sapiens
aaacgacccacgcgtcc

SEQ ID NO: 212 - DNA, 17 bp, Homo sapiens
aacacaggcgttgatga

SEQ ID NO: 213 - DNA, 17 bp, Homo sapiens
acaccggcctcgtacct

SEQ ID NO: 214 - DNA, 18 bp, Homo sapiens
acacgcagcctcgtacct

SEQ ID NO: 215 - DNA, 22 bp, Homo sapiens
accacccagcctcgtacctagc

SEQ ID NO: 216 - DNA, 23 bp, Homo sapiens
accacccagcctcgtacctagcc

SEQ ID NO: 217 - DNA, 24 bp, Homo sapiens
accacccagcctcgtacctagcct

SEQ ID NO: 218 - DNA, 22 bp, Homo sapiens
accaggcctcgtacctagccta

SEQ ID NO: 219 - DNA, 21 bp, Homo sapiens
acccagcctcgtacctagcca

SEQ ID NO: 220 - DNA, 19 bp, Homo sapiens
aggcctcgctacctagcct

SEQ ID NO: 221 - DNA, 18 bp, Homo sapiens
aggcctcgtacctagccg

SEQ ID NO: 222 - DNA, 18 bp, Homo sapiens
atggaggacccaatctgg

SEQ ID NO: 223 - DNA, 17 bp, Homo sapiens
attgctcccaggtaagg

SEQ ID NO: 224 - DNA, 17 bp, Homo sapiens
caagactagttctctcc

SEQ ID NO: 225 - DNA, 17 bp, Homo sapiens
caccacccagcctcgta

SEQ ID NO: 226 - DNA, 18 bp, Homo sapiens
caccacccagcctcgtac

SEQ ID NO: 227 - DNA, 22 bp, Homo sapiens
cacccagcctcgtacctagccg

SEQ ID NO: 228 - DNA, 21 bp, Homo sapiens
cacccagcctcgtactagcct

SEQ ID NO: 229 - DNA, 24 bp, Homo sapiens
cacccggcctcgtacctagccgta

SEQ ID NO: 230 - DNA, 17 bp, Homo sapiens
cagagcccttgacgtac

SEQ ID NO: 231 - DNA, 19 bp, Homo sapiens
cagcctcgctacctagccg

SEQ ID NO: 232 - DNA, 19 bp, Homo sapiens
cagcctcgtacctagcctt

SEQ ID NO: 233 - DNA, 21 bp, Homo sapiens
caggcctcgtacctagcctaa

SEQ ID NO: 234 - DNA, 17 bp, Homo sapiens
cagtcccagaccttcaa

SEQ ID NO: 235 - DNA, 22 bp, Homo sapiens
ccagcctcgtacctagccgtaa

SEQ ID NO: 236 - DNA, 17 bp, Homo sapiens
ccaggcctcgtacttag

SEQ ID NO: 237 - DNA, 20 bp, Homo sapiens
cccagcctcgtacctagcca

SEQ ID NO: 238 - DNA, 17 bp, Homo sapiens
ccgaactctgttggtct

SEQ ID NO: 239 - DNA, 28 bp, Homo sapiens
ccgattaacacccagcctcgtacctagc

SEQ ID NO: 240 - DNA, 18 bp, Homo sapiens
ccgtgccctcgtttggcc

SEQ ID NO: 241 - DNA, 22 bp, Homo sapiens
cctcggccgattaaccccggcc

SEQ ID NO: 242 - DNA, 35 bp, Homo sapiens
cctcggccgattcacacccagcctcgtacctagcc

SEQ ID NO: 243 - DNA, 24 bp, Homo sapiens
cctcggccgattcacacccgcctc

SEQ ID NO: 244 - DNA, 20 bp, Homo sapiens
cctcggccgattcaccaccg

SEQ ID NO: 245 - DNA, 18 bp, Homo sapiens
cctcggccgatttacacc

SEQ ID NO: 246 - DNA, 20 bp, Homo sapiens
cctcgtacctagccgtaagt

SEQ ID NO: 247 - DNA, 21 bp, Homo sapiens
cctcgtacctagccgtagttt

SEQ ID NO: 248 - DNA, 21 bp, Homo sapiens
cctcgtacctagcctaagttt

SEQ ID NO: 249 - DNA, 18 bp, Homo sapiens
cgccctcggccgattcac

SEQ ID NO: 250 - DNA, 32 bp, Homo sapiens
cggccgattcacacccagcctcgtacctagcc

SEQ ID NO: 251 - DNA, 18 bp, Homo sapiens
ctctcggtcataccatcc

SEQ ID NO: 252 - DNA, 17 bp, Homo sapiens
ctggtacacctcaagcc

SEQ ID NO: 253 - DNA, 19 bp, Homo sapiens
gaggacccaatctggctaa

SEQ ID NO: 254 - DNA, 18 bp, Homo sapiens
gaggaggacgcgttcggc

SEQ ID NO: 255 - DNA, 18 bp, Homo sapiens
gatggtgtccgtggtttg

SEQ ID NO: 256 - DNA, 27 bp, Homo sapiens
gattcacacccagcctcgtacctagcc

SEQ ID NO: 257 - DNA, 17 bp, Homo sapiens
gcatccacatccttatc

SEQ ID NO: 258 - DNA, 19 bp, Homo sapiens
gcccccgctgtcgcccagc

SEQ ID NO: 259 - DNA, 17 bp, Homo sapiens
gcctcgcacctagccgt

SEQ ID NO: 260 - DNA, 18 bp, Homo sapiens
gcctcgtacctagccgaa

SEQ ID NO: 261 - DNA, 22 bp, Homo sapiens
gcctcgtacctagccgtaagtt

SEQ ID NO: 262 - DNA, 20 bp, Homo sapiens
gcctcgtacctagcctagtt

SEQ ID NO: 263 - DNA, 18 bp, Homo sapiens
gcgcctcggccgattaac

SEQ ID NO: 264 - DNA, 21 bp, Homo sapiens
ggccgattcacccccagcctc

SEQ ID NO: 265 - DNA, 17 bp, Homo sapiens
gggcagattacttcctc

SEQ ID NO: 266 - DNA, 17 bp, Homo sapiens
ggggggccccaggccct

SEQ ID NO: 267 - DNA, 22 bp, Homo sapiens
taacaccaggcctcgtacctag

SEQ ID NO: 268 - DNA, 17 bp, Homo sapiens
taagttaatttagttgg

SEQ ID NO: 269 - DNA, 19 bp, Homo sapiens
taataagccgttaaagtta

SEQ ID NO: 270 - DNA, 19 bp, Homo sapiens
tcagcgtccacctctgcag

SEQ ID NO: 271 - DNA, 17 bp, Homo sapiens
tccatcacttgcttccc

SEQ ID NO: 272 - DNA, 17 bp, Homo sapiens
tcgtggagatcccaaac

SEQ ID NO: 273 - DNA, 18 bp, Homo sapiens
tctggttgacttgagcag

SEQ ID NO: 274 - DNA, 17 bp, Homo sapiens
tgagggggcccttcgga

SEQ ID NO: 275 - DNA, 19 bp, Homo sapiens
tgcatgggacacgaagcca

SEQ ID NO: 276 - DNA, 17 bp, Homo sapiens
tgcctgttgccagctct

SEQ ID NO: 277 - DNA, 17 bp, Homo sapiens
tgcttggctaatccaca

SEQ ID NO: 278 - DNA, 17 bp, Homo sapiens
ttcattgggagtacttg

SEQ ID NO: 279 - DNA, 18 bp, Homo sapiens
ttggccacatgagagtaa

SEQ ID NO: 280 - DNA, 17 bp, Homo sapiens
ttgtcattatctcgttc

SEQ ID NO: 281 - DNA, 18 bp, Homo sapiens
ttgtccagcagcttcctc

SEQ ID NO: 282 - DNA, 17 bp, Homo sapiens
ttgtgtagatccagtcc

SEQ ID NO: 283 - DNA, 17 bp, Homo sapiens
tttcatgtacgaaggaa

SEQ ID NO: 284 - DNA, 18 bp, Homo sapiens
ccagcctcgtactagcta

SEQ ID NO: 285 - DNA, 17 bp, Homo sapiens
cctcgtacctagccgaa

SEQ ID NO: 286 - DNA, 17 bp, Homo sapiens
cgattcacacccggcct

SEQ ID NO: 287 - DNA, 17 bp, Homo sapiens
ctcggccgatttacacc

SEQ ID NO: 288 - DNA, 18 bp, Homo sapiens
ctcgtacctagcctagtt

SEQ ID NO: 289 - DNA, 19 bp, Homo sapiens
tcgtacctagccgtaagtt

SEQ ID NO: 290 - DNA, 17 bp, Homo sapiens
tcgtccgattcacaccc

SEQ ID NO: 291 - DNA, 23 bp, Homo sapiens
aacaccagcctcgtacctagcct

SEQ ID NO: 292 - DNA, 23 bp, Homo sapiens
aacacccaggcctcgtacctagc

SEQ ID NO: 293 - DNA, 17 bp, Homo sapiens
aagggtgcaggatgtgc

SEQ ID NO: 294 - DNA, 22 bp, Homo sapiens
acacacccagcctcgtacctag

SEQ ID NO: 295 - DNA, 24 bp, Homo sapiens
acaccaggcctcgtacctagccta

SEQ ID NO: 296 - DNA, 17 bp, Homo sapiens
acacccagcctcgcacc

SEQ ID NO: 297 - DNA, 23 bp, Homo sapiens
acacccagcctcgtacctagccc

SEQ ID NO: 298 - DNA, 23 bp, Homo sapiens
acacccagcctcgtacctagccg

SEQ ID NO: 299 - DNA, 24 bp, Homo sapiens
acacccagcctcgtacctagcctt

SEQ ID NO: 300 - DNA, 25 bp, Homo sapiens
acacccagcctcgtacctagcctta

SEQ ID NO: 301 - DNA, 18 bp, Homo sapiens
acacccaggcctcgtacc

SEQ ID NO: 302 - DNA, 23 bp, Homo sapiens
acacccaggcctcgtacctagcc

SEQ ID NO: 303 - DNA, 24 bp, Homo sapiens
acacccaggcctcgtacctagccg

SEQ ID NO: 304 - DNA, 25 bp, Homo sapiens
accacccagcctcgtacctagccta

SEQ ID NO: 305 - DNA, 17 bp, Homo sapiens
accaggctcgtactagc

SEQ ID NO: 306 - DNA, 22 bp, Homo sapiens
acccagcctcgtacctagccga

SEQ ID NO: 307 - DNA, 24 bp, Homo sapiens
acccagcctcgtacctagccgtaa

SEQ ID NO: 308 - DNA, 22 bp, Homo sapiens
acccagcctcgtacctagcctt

SEQ ID NO: 309 - DNA, 20 bp, Homo sapiens
acccagcctcgtacctagct

SEQ ID NO: 310 - DNA, 21 bp, Homo sapiens
acccagcctcgtactagccta

SEQ ID NO: 311 - DNA, 20 bp, Homo sapiens
acccaggcctcgtacctagc

SEQ ID NO: 312 - DNA, 21 bp, Homo sapiens
acccaggcctcgtacctagcc

SEQ ID NO: 313 - DNA, 20 bp, Homo sapiens
accccagcctctacctagcc

SEQ ID NO: 314 - DNA, 19 bp, Homo sapiens
accctcggccgattcacca

SEQ ID NO: 315 - DNA, 17 bp, Homo sapiens
acgacacacaacaacac

SEQ ID NO: 316 - DNA, 17 bp, Homo sapiens
agagagaggagacacac

SEQ ID NO: 317 - DNA, 17 bp, Homo sapiens
agcaagtcatcggatac

SEQ ID NO: 318 - DNA, 20 bp, Homo sapiens
agcctcgtacctagcctata

SEQ ID NO: 319 - DNA, 18 bp, Homo sapiens
aggcctcgtactagccta

SEQ ID NO: 320 - DNA, 17 bp, Homo sapiens
agtcttcaatgagcctc

SEQ ID NO: 321 - DNA, 17 bp, Homo sapiens
agtttatttagttggcg

SEQ ID NO: 322 - DNA, 19 bp, Homo sapiens
atagccccgcatacgtgga

SEQ ID NO: 323 - DNA, 17 bp, Homo sapiens
atgcccccagagatcac

SEQ ID NO: 324 - DNA, 17 bp, Homo sapiens
caaactgttttagcatc

SEQ ID NO: 325 - DNA, 27 bp, Homo sapiens
caacacccagcctcgtacctagcctaa

SEQ ID NO: 326 - DNA, 22 bp, Homo sapiens
caacccagcctcgtacctagcc

SEQ ID NO: 327 - DNA, 22 bp, Homo sapiens
caccacccagcctcgtacctag

SEQ ID NO: 328 - DNA, 23 bp, Homo sapiens
caccacccagcctcgtacctagc

SEQ ID NO: 329 - DNA, 24 bp, Homo sapiens
caccacccagcctcgtacctagcc

SEQ ID NO: 330 - DNA, 26 bp, Homo sapiens
caccacccagcctcgtacctagccta

SEQ ID NO: 331 - DNA, 22 bp, Homo sapiens
cacccagcctcgtacctagcca

SEQ ID NO: 332 - DNA, 24 bp, Homo sapiens
cacccagcctcgtacctagcctta

SEQ ID NO: 333 - DNA, 23 bp, Homo sapiens
cacccaggcctcgtacctagccg

SEQ ID NO: 334 - DNA, 24 bp, Homo sapiens
cacccaggcctcgtacctagccgt

SEQ ID NO: 335 - DNA, 18 bp, Homo sapiens
caccggcctcgtactagc

SEQ ID NO: 336 - DNA, 17 bp, Homo sapiens
cagagtccctaaagaag

SEQ ID NO: 337 - DNA, 22 bp, Homo sapiens
cagcctcgtacctagccgtaag

SEQ ID NO: 338 - DNA, 21 bp, Homo sapiens
caggcctcgtacctagccgta

SEQ ID NO: 339 - DNA, 18 bp, Homo sapiens
cagttgcccttaatggaa

SEQ ID NO: 340 - DNA, 17 bp, Homo sapiens
catctcagacaaggcag

SEQ ID NO: 341 - DNA, 17 bp, Homo sapiens
ccaagaacatgtggaga

SEQ ID NO: 342 - DNA, 17 bp, Homo sapiens
ccacgtgatgtagactg

SEQ ID NO: 343 - DNA, 19 bp, Homo sapiens
ccagcctcgtacctagacc

SEQ ID NO: 344 - DNA, 20 bp, Homo sapiens
ccagcctcgtacctagccga

SEQ ID NO: 345 - DNA, 17 bp, Homo sapiens
ccagctttttccttgga

SEQ ID NO: 346 - DNA, 23 bp, Homo sapiens
ccaggcctcgtacctagcctaag

SEQ ID NO: 347 - DNA, 26 bp, Homo sapiens
cccagcctcgtacctagccgtaagtt

SEQ ID NO: 348 - DNA, 17 bp, Homo sapiens
cccaggcctcgcaccta

SEQ ID NO: 349 - DNA, 20 bp, Homo sapiens
cccaggcctcgtacctagcc

SEQ ID NO: 350 - DNA, 21 bp, Homo sapiens
cccaggcctcgtacctagccg

SEQ ID NO: 351 - DNA, 17 bp, Homo sapiens
cccaggctcgtactagc

SEQ ID NO: 352 - DNA, 17 bp, Homo sapiens
cccttttccccctggtc

SEQ ID NO: 353 - DNA, 19 bp, Homo sapiens
cctatctggttgactttga

SEQ ID NO: 354 - DNA, 17 bp, Homo sapiens
cctcgcacctagccgta

SEQ ID NO: 355 - DNA, 18 bp, Homo sapiens
cctcgccgattcacaccc

SEQ ID NO: 356 - DNA, 18 bp, Homo sapiens
cctcggccgatcaacacc

SEQ ID NO: 357 - DNA, 25 bp, Homo sapiens
cctcggccgattaacaccaggcctc

SEQ ID NO: 358 - DNA, 34 bp, Homo sapiens
cctcggccgattaacacccagcctcgtacctagc

SEQ ID NO: 359 - DNA, 19 bp, Homo sapiens
cctcggccgattaacccca

SEQ ID NO: 360 - DNA, 19 bp, Homo sapiens
cctcggccgattcacccca

SEQ ID NO: 361 - DNA, 18 bp, Homo sapiens
cctcgtacctagcctatg

SEQ ID NO: 362 - DNA, 17 bp, Homo sapiens
cctcgtccgattacacc

SEQ ID NO: 363 - DNA, 20 bp, Homo sapiens
cctcgtccgattcacacccg

SEQ ID NO: 364 - DNA, 17 bp, Homo sapiens
cctcgtccgattcaccc

SEQ ID NO: 365 - DNA, 17 bp, Homo sapiens
cctctgccgattcaccc

SEQ ID NO: 366 - DNA, 17 bp, Homo sapiens
cgaaatgccacccaggc

SEQ ID NO: 367 - DNA, 19 bp, Homo sapiens
cgcgtggtcgcgacgcgtg

SEQ ID NO: 368 - DNA, 17 bp, Homo sapiens
cggccgattaacccccg

SEQ ID NO: 369 - DNA, 18 bp, Homo sapiens
cggccgattcacacccgg

SEQ ID NO: 370 - DNA, 17 bp, Homo sapiens
cggcctctactagccta

SEQ ID NO: 371 - DNA, 21 bp, Homo sapiens
cggcggggtgatgtccgtcgg

SEQ ID NO: 372 - DNA, 17 bp, Homo sapiens
cggctcgtactagccta

SEQ ID NO: 373 - DNA, 19 bp, Homo sapiens
cgtacctagcctaagtttt

SEQ ID NO: 374 - DNA, 18 bp, Homo sapiens
cgtacctagccttaagtt

SEQ ID NO: 375 - DNA, 21 bp, Homo sapiens
ctcggccgattcacacccggc

SEQ ID NO: 376 - DNA, 17 bp, Homo sapiens
ctcgtacctagccgaag

SEQ ID NO: 377 - DNA, 18 bp, Homo sapiens
ctcgtccgattcacaccc

SEQ ID NO: 378 - DNA, 17 bp, Homo sapiens
ctcgtggggaattcgcc

SEQ ID NO: 379 - DNA, 18 bp, Homo sapiens
cttcttctgttcatcaga

SEQ ID NO: 380 - DNA, 18 bp, Homo sapiens
cttgcgcttaactcagca

SEQ ID NO: 381 - DNA, 22 bp, Homo sapiens
gacacccagcctcgtacctagc

SEQ ID NO: 382 - DNA, 23 bp, Homo sapiens
gacacccagcctcgtacctagcc

SEQ ID NO: 383 - DNA, 18 bp, Homo sapiens
gacgattggtgttaggat

SEQ ID NO: 384 - DNA, 21 bp, Homo sapiens
gacgcgtggtcgcgacgcgtg

SEQ ID NO: 385 - DNA, 18 bp, Homo sapiens
gatacctgggcccccggc

SEQ ID NO: 386 - DNA, 17 bp, Homo sapiens
gccgattcacaccaggc

SEQ ID NO: 387 - DNA, 18 bp, Homo sapiens
gccgattcaccacccgcc

SEQ ID NO: 388 - DNA, 19 bp, Homo sapiens
gcctcgctacctagccgta

SEQ ID NO: 389 - DNA, 18 bp, Homo sapiens
gcctcgctacctagcctt

SEQ ID NO: 390 - DNA, 17 bp, Homo sapiens
gcctcgctaccttaaac

SEQ ID NO: 391 - DNA, 17 bp, Homo sapiens
gcctcgctacttagacc

SEQ ID NO: 392 - DNA, 23 bp, Homo sapiens
gcctcgtacctagccgtaagttt

SEQ ID NO: 393 - DNA, 17 bp, Homo sapiens
gcctggcgcgcgggccg

SEQ ID NO: 394 - DNA, 17 bp, Homo sapiens
gccttggccgatccgcc

SEQ ID NO: 395 - DNA, 19 bp, Homo sapiens
gcgccccaagggaccccag

SEQ ID NO: 396 - DNA, 19 bp, Homo sapiens
gctcatactgtgctccaaa

SEQ ID NO: 397 - DNA, 21 bp, Homo sapiens
gctgatgtaggattttatatt

SEQ ID NO: 398 - DNA, 24 bp, Homo sapiens
gctgatgtaggattttatatttac

SEQ ID NO: 399 - DNA, 18 bp, Homo sapiens
gctgttgtcatacttgct

SEQ ID NO: 400 - DNA, 17 bp, Homo sapiens
ggaccggccttcaagcc

SEQ ID NO: 401 - DNA, 17 bp, Homo sapiens
ggaggacatcttgagcc

SEQ ID NO: 402 - DNA, 17 bp, Homo sapiens
ggaggacccaatctggc

SEQ ID NO: 403 - DNA, 17 bp, Homo sapiens
ggccagcgccccccggg

SEQ ID NO: 404 - DNA, 18 bp, Homo sapiens
ggccgattcacacccggc

SEQ ID NO: 405 - DNA, 20 bp, Homo sapiens
ggccgattcacacccggcct

SEQ ID NO: 406 - DNA, 19 bp, Homo sapiens
ggcctcgctacctagccta

SEQ ID NO: 407 - DNA, 18 bp, Homo sapiens
ggcctcggccgattaaca

SEQ ID NO: 408 - DNA, 17 bp, Homo sapiens
ggctagcttggtttaag

SEQ ID NO: 409 - DNA, 17 bp, Homo sapiens
gggcagcgggacccgct

SEQ ID NO: 410 - DNA, 17 bp, Homo sapiens
gggggacccataaggag

SEQ ID NO: 411 - DNA, 17 bp, Homo sapiens
gggggagccacaaaggg

SEQ ID NO: 412 - DNA, 17 bp, Homo sapiens
gggtttcaaacaagtca

SEQ ID NO: 413 - DNA, 17 bp, Homo sapiens
gtccctcattggagtac

SEQ ID NO: 414 - DNA, 17 bp, Homo sapiens
gtgcctcggccgattaa

SEQ ID NO: 415 - DNA, 17 bp, Homo sapiens
gtggtacacacgaagca

SEQ ID NO: 416 - DNA, 17 bp, Homo sapiens
gtggtgtcgcgggggtg

SEQ ID NO: 417 - DNA, 17 bp, Homo sapiens
gtgtccactggaaattt

SEQ ID NO: 418 - DNA, 24 bp, Homo sapiens
gttcatgacatgcgggtactgagc

SEQ ID NO: 419 - DNA, 25 bp, Homo sapiens
taaacacccagcctcgtacctagcc

SEQ ID NO: 420 - DNA, 17 bp, Homo sapiens
tagacatccggagagca

SEQ ID NO: 421 - DNA, 18 bp, Homo sapiens
tagccaggggccagcacg

SEQ ID NO: 422 - DNA, 18 bp, Homo sapiens
taggattttatatttact

SEQ ID NO: 423 - DNA, 24 bp, Homo sapiens
tatcatctccagaggcaagttcag

SEQ ID NO: 424 - DNA, 25 bp, Homo sapiens
tcaccacccagcctcgtacctagcc

SEQ ID NO: 425 - DNA, 20 bp, Homo sapiens
tcatcgatacaccatcatga

SEQ ID NO: 426 - DNA, 23 bp, Homo sapiens
tcggccgattaacaccagcctcg

SEQ ID NO: 427 - DNA, 20 bp, Homo sapiens
tcggccgattaacaccgagc

SEQ ID NO: 428 - DNA, 21 bp, Homo sapiens
tcggccgattaacaccggcct

SEQ ID NO: 429 - DNA, 17 bp, Homo sapiens
tcggccgattaaccccc

SEQ ID NO: 430 - DNA, 35 bp, Homo sapiens
tcggccgattcaacacccagcctcgtacctagcct

SEQ ID NO: 431 - DNA, 17 bp, Homo sapiens
tcggccgattcacacac

SEQ ID NO: 432 - DNA, 19 bp, Homo sapiens
tcggccgattcacaccggc

SEQ ID NO: 433 - DNA, 20 bp, Homo sapiens
tcggccgattcaccaccggc

SEQ ID NO: 434 - DNA, 17 bp, Homo sapiens
tcggccgatttaaaccc

SEQ ID NO: 435 - DNA, 19 bp, Homo sapiens
tcggccgatttacacccgg

SEQ ID NO: 436 - DNA, 18 bp, Homo sapiens
tcgtggggaattcgccac

SEQ ID NO: 437 - DNA, 17 bp, Homo sapiens
tctcttgcatgggagaa

SEQ ID NO: 438 - DNA, 17 bp, Homo sapiens
tctggagagccccagcg

SEQ ID NO: 439 - DNA, 18 bp, Homo sapiens
tctggccgtgcgccagct

SEQ ID NO: 440 - DNA, 18 bp, Homo sapiens
tcttgaaacgccacccag

SEQ ID NO: 441 - DNA, 17 bp, Homo sapiens
tgaacgccacccaggcc

SEQ ID NO: 442 - DNA, 18 bp, Homo sapiens
tgagtgtaacaggagatt

SEQ ID NO: 443 - DNA, 17 bp, Homo sapiens
tggtcctggttggccgg

SEQ ID NO: 444 - DNA, 17 bp, Homo sapiens
tggttccaaatgtaatg

SEQ ID NO: 445 - DNA, 17 bp, Homo sapiens
tgtctgagcaaccctct

SEQ ID NO: 446 - DNA, 17 bp, Homo sapiens
ttcacctgggagagaaa

SEQ ID NO: 447 - DNA, 18 bp, Homo sapiens
ttccgttcagttcaggga

SEQ ID NO: 448 - DNA, 18 bp, Homo sapiens
tttctaacgcagtcagtc

SEQ ID NO: 449 - DNA, 17 bp, Homo sapiens
cctcgctacctagcctt

SEQ ID NO: 450 - DNA, 17 bp, Homo sapiens
aaactcgttcactagtt

SEQ ID NO: 451 - DNA, 17 bp, Homo sapiens
aaactggagtcctggca

SEQ ID NO: 452 - DNA, 18 bp, Homo sapiens
aaatggagaactgccagc

SEQ ID NO: 453 - DNA, 18 bp, Homo sapiens
aaatgtatcaaacgaaca

SEQ ID NO: 454 - DNA, 24 bp, Homo sapiens
aacacccagcctcgtacctagccg

SEQ ID NO: 455 - DNA, 26 bp, Homo sapiens
aacacccagcctcgtacctagccgta

SEQ ID NO: 456 - DNA, 26 bp, Homo sapiens
aacacccagcctcgtacctagcctat

SEQ ID NO: 457 - DNA, 25 bp, Homo sapiens
aacacccggcctcgtacctagccta

SEQ ID NO: 458 - DNA, 17 bp, Homo sapiens
aactagtgaacgagttt

SEQ ID NO: 459 - DNA, 17 bp, Homo sapiens
aagatccggtattaatc

SEQ ID NO: 460 - DNA, 18 bp, Homo sapiens
aagcacagatacactgac

SEQ ID NO: 461 - DNA, 17 bp, Homo sapiens
aagggggttccttgggc

SEQ ID NO: 462 - DNA, 17 bp, Homo sapiens
aaggttagttttcgtgg

SEQ ID NO: 463 - DNA, 17 bp, Homo sapiens
aatcttccttaattata

SEQ ID NO: 464 - DNA, 18 bp, Homo sapiens
acacaatctgctaatagc

SEQ ID NO: 465 - DNA, 25 bp, Homo sapiens
acacccagcctcgtacctagccgta

SEQ ID NO: 466 - DNA, 25 bp, Homo sapiens
accacccagcctcgtacctagccgt

SEQ ID NO: 467 - DNA, 20 bp, Homo sapiens
acccagcctcgtacctagcg

SEQ ID NO: 468 - DNA, 21 bp, Homo sapiens
acccaggctcgctacctagac

SEQ ID NO: 469 - DNA, 18 bp, Homo sapiens
acgagctgttggactgag

SEQ ID NO: 470 - DNA, 18 bp, Homo sapiens
acgattccggaaatccgg

SEQ ID NO: 471 - DNA, 17 bp, Homo sapiens
acgatttggtgttagaa

SEQ ID NO: 472 - DNA, 23 bp, Homo sapiens
acgcgtgggtccgacgcgtgggt

SEQ ID NO: 473 - DNA, 17 bp, Homo sapiens
agaccgttatagtactg

SEQ ID NO: 474 - DNA, 17 bp, Homo sapiens
agagcaggatgatttct

SEQ ID NO: 475 - DNA, 19 bp, Homo sapiens
agatgctgcttgagaacga

SEQ ID NO: 476 - DNA, 17 bp, Homo sapiens
agcccaaacttgcagag

SEQ ID NO: 477 - DNA, 20 bp, Homo sapiens
agcctcgctacctagccgta

SEQ ID NO: 478 - DNA, 18 bp, Homo sapiens
agcctcgctacctagcct

SEQ ID NO: 479 - DNA, 19 bp, Homo sapiens
agcctcgctacctagccta

SEQ ID NO: 480 - DNA, 19 bp, Homo sapiens
agcgctcaagatcatcagc

SEQ ID NO: 481 - DNA, 18 bp, Homo sapiens
aggcatgtttagcactgg

SEQ ID NO: 482 - DNA, 19 bp, Homo sapiens
aggcctcgtacctagccga

SEQ ID NO: 483 - DNA, 23 bp, Homo sapiens
aggcctcgtacctagcctaagtt

SEQ ID NO: 484 - DNA, 17 bp, Homo sapiens
aggcctcgtacctagct

SEQ ID NO: 485 - DNA, 17 bp, Homo sapiens
aggtgcagccccagcag

SEQ ID NO: 486 - DNA, 18 bp, Homo sapiens
agtttatttagtttggcg

SEQ ID NO: 487 - DNA, 17 bp, Homo sapiens
ataccacatgcagaatg

SEQ ID NO: 488 - DNA, 18 bp, Homo sapiens
atacgaccccagacttag

SEQ ID NO: 489 - DNA, 17 bp, Homo sapiens
atcagagggctccaggt

SEQ ID NO: 490 - DNA, 17 bp, Homo sapiens
atgggaattagccgagc

SEQ ID NO: 491 - DNA, 18 bp, Homo sapiens
attaaagtctattcaaaa

SEQ ID NO: 492 - DNA, 17 bp, Homo sapiens
atttttccccccttgtg

SEQ ID NO: 493 - DNA, 20 bp, Homo sapiens
caacaccaggcctcgtacct

SEQ ID NO: 494 - DNA, 17 bp, Homo sapiens
caacccaggcctcgtac

SEQ ID NO: 495 - DNA, 17 bp, Homo sapiens
cacacacctgcaccctg

SEQ ID NO: 496 - DNA, 19 bp, Homo sapiens
cacacccagcctcgtacta

SEQ ID NO: 497 - DNA, 25 bp, Homo sapiens
caccacccagcctcgtacctagccg

SEQ ID NO: 498 - DNA, 24 bp, Homo sapiens
cacccagcctcgtacctagccgta

SEQ ID NO: 499 - DNA, 19 bp, Homo sapiens
cacccagcctcgtacctta

SEQ ID NO: 500 - DNA, 24 bp, Homo sapiens
cacccaggcctcgtacctagccta

SEQ ID NO: 501 - DNA, 24 bp, Homo sapiens
cacccaggcctcgtacctagcctt

SEQ ID NO: 502 - DNA, 18 bp, Homo sapiens
caccctcggccgattcaa

SEQ ID NO: 503 - DNA, 17 bp, Homo sapiens
cagaagcgaagctttcc

SEQ ID NO: 504 - DNA, 18 bp, Homo sapiens
cagcctcgacctagccga

SEQ ID NO: 505 - DNA, 21 bp, Homo sapiens
cagcctcgtacctagccgtat

SEQ ID NO: 506 - DNA, 21 bp, Homo sapiens
cagcctcgtacctagccgtta

SEQ ID NO: 507 - DNA, 17 bp, Homo sapiens
cagcgtgggtttccact

SEQ ID NO: 508 - DNA, 18 bp, Homo sapiens
cagcgtgttccctggcat

SEQ ID NO: 509 - DNA, 20 bp, Homo sapiens
caggcctcgtacctagccga

SEQ ID NO: 510 - DNA, 28 bp, Homo sapiens
catatccatagacagaggccggagtgct

SEQ ID NO: 511 - DNA, 18 bp, Homo sapiens
cattgacgattgtgttag

SEQ ID NO: 512 - DNA, 17 bp, Homo sapiens
ccaacaatgctcacgtg

SEQ ID NO: 513 - DNA, 22 bp, Homo sapiens
ccaacacccaggcctcgtacct

SEQ ID NO: 514 - DNA, 19 bp, Homo sapiens
ccaaccccgtagtcctcct

SEQ ID NO: 515 - DNA, 23 bp, Homo sapiens
ccacccagcctcgtacctagacc

SEQ ID NO: 516 - DNA, 23 bp, Homo sapiens
ccacccagcctcgtacctagccg

SEQ ID NO: 517 - DNA, 19 bp, Homo sapiens
ccacccaggcctcgcacct

SEQ ID NO: 518 - DNA, 17 bp, Homo sapiens
ccacgggtcctgtggcg

SEQ ID NO: 519 - DNA, 26 bp, Homo sapiens
ccactacctagaacctaaactgccct

SEQ ID NO: 520 - DNA, 22 bp, Homo sapiens
ccagcctcgtacctagccgtat

SEQ ID NO: 521 - DNA, 17 bp, Homo sapiens
ccagcttatgaagtctc

SEQ ID NO: 522 - DNA, 17 bp, Homo sapiens
ccatgtggtagacatcc

SEQ ID NO: 523 - DNA, 17 bp, Homo sapiens
ccattcacgcccacagt

SEQ ID NO: 524 - DNA, 22 bp, Homo sapiens
cccagcctcgtacctagccttt

SEQ ID NO: 525 - DNA, 19 bp, Homo sapiens
cccagcctcgtactagcta

SEQ ID NO: 526 - DNA, 17 bp, Homo sapiens
cccagctcgtactagcc

SEQ ID NO: 527 - DNA, 21 bp, Homo sapiens
cccaggcctcgcacctagccg

SEQ ID NO: 528 - DNA, 22 bp, Homo sapiens
cccaggcctcgtacctagcctt

SEQ ID NO: 529 - DNA, 18 bp, Homo sapiens
cccaggctcgtacctagc

SEQ ID NO: 530 - DNA, 17 bp, Homo sapiens
ccccacatctaggcctt

SEQ ID NO: 531 - DNA, 17 bp, Homo sapiens
ccccagggttaaaaggt

SEQ ID NO: 532 - DNA, 18 bp, Homo sapiens
ccccccccctcgtttgtt

SEQ ID NO: 533 - DNA, 18 bp, Homo sapiens
cccggcctcgtcctagcc

SEQ ID NO: 534 - DNA, 17 bp, Homo sapiens
ccctcggccgagtaaca

SEQ ID NO: 535 - DNA, 17 bp, Homo sapiens
ccctcgtccgattaccc

SEQ ID NO: 536 - DNA, 27 bp, Homo sapiens
ccgattaacaccagcctcgtacctagc

SEQ ID NO: 537 - DNA, 17 bp, Homo sapiens
ccgattcaccacccggc

SEQ ID NO: 538 - DNA, 17 bp, Homo sapiens
ccgattcaccccggcct

SEQ ID NO: 539 - DNA, 17 bp, Homo sapiens
ccgccccccggacatta

SEQ ID NO: 540 - DNA, 21 bp, Homo sapiens
ccgcctctcttctaaggtact

SEQ ID NO: 541 - DNA, 27 bp, Homo sapiens
ccgctctcgggggctgtaatcatcctc

SEQ ID NO: 542 - DNA, 17 bp, Homo sapiens
ccggagtgctcgcggag

SEQ ID NO: 543 - DNA, 19 bp, Homo sapiens
ccggcctcgtacctagccc

SEQ ID NO: 544 - DNA, 21 bp, Homo sapiens
ccggcctcgtacctagcctta

SEQ ID NO: 545 - DNA, 17 bp, Homo sapiens
ccggctgtaccaccgga

SEQ ID NO: 546 - DNA, 18 bp, Homo sapiens
ccgggcctcgtacctagc

SEQ ID NO: 547 - DNA, 17 bp, Homo sapiens
cctcggccgagtaacac

SEQ ID NO: 548 - DNA, 18 bp, Homo sapiens
cctcggccgattaccccg

SEQ ID NO: 549 - DNA, 25 bp, Homo sapiens
cctcggccgattcaccaccggcctc

SEQ ID NO: 550 - DNA, 20 bp, Homo sapiens
cctcggccgattcaccccag

SEQ ID NO: 551 - DNA, 17 bp, Homo sapiens
cctcggccgatttcaac

SEQ ID NO: 552 - DNA, 17 bp, Homo sapiens
cctcgtactagcctaag

SEQ ID NO: 553 - DNA, 18 bp, Homo sapiens
cctcgtccgattcacccc

SEQ ID NO: 554 - DNA, 21 bp, Homo sapiens
cctcgtcggaatcccacccag

SEQ ID NO: 555 - DNA, 17 bp, Homo sapiens
cctcgtgccgattaaca

SEQ ID NO: 556 - DNA, 17 bp, Homo sapiens
cctctgacaccaggttg

SEQ ID NO: 557 - DNA, 23 bp, Homo sapiens
ccttgtcagcgccactccatgtt

SEQ ID NO: 558 - DNA, 17 bp, Homo sapiens
cgacccggaccgctcat

SEQ ID NO: 559 - DNA, 18 bp, Homo sapiens
cgatctgtgtttgtctga

SEQ ID NO: 560 - DNA, 31 bp, Homo sapiens
cgattcaacacccagcctcgtacctagccta

SEQ ID NO: 561 - DNA, 17 bp, Homo sapiens
cgattgttgtagatcca

SEQ ID NO: 562 - DNA, 17 bp, Homo sapiens
cgcctgctcacagttca

SEQ ID NO: 563 - DNA, 18 bp, Homo sapiens
cggaatcgccactcaggc

SEQ ID NO: 564 - DNA, 17 bp, Homo sapiens
cggccccccgaacatag

SEQ ID NO: 565 - DNA, 31 bp, Homo sapiens
cggccgattaacaccagcctcgtacctagcc

SEQ ID NO: 566 - DNA, 21 bp, Homo sapiens
cggccgattcacccccgcctc

SEQ ID NO: 567 - DNA, 17 bp, Homo sapiens
cgggcgcagccgacgct

SEQ ID NO: 568 - DNA, 17 bp, Homo sapiens
cgtccgctagaactagt

SEQ ID NO: 569 - DNA, 19 bp, Homo sapiens
ctagccaggggccagcacg

SEQ ID NO: 570 - DNA, 17 bp, Homo sapiens
ctccttgccaggcaaag

SEQ ID NO: 571 - DNA, 17 bp, Homo sapiens
ctcgcgccccccccacc

SEQ ID NO: 572 - DNA, 17 bp, Homo sapiens
ctcgctacctagcctaa

SEQ ID NO: 573 - DNA, 17 bp, Homo sapiens
ctcggccgattaaaacc

SEQ ID NO: 574 - DNA, 22 bp, Homo sapiens
ctcggccgattaaccccgcctc

SEQ ID NO: 575 - DNA, 22 bp, Homo sapiens
ctcggccgattcacccccggcc

SEQ ID NO: 576 - DNA, 20 bp, Homo sapiens
ctcgtacctagccgtatatt

SEQ ID NO: 577 - DNA, 17 bp, Homo sapiens
ctcgtactagcctagtt

SEQ ID NO: 578 - DNA, 17 bp, Homo sapiens
ctgatgtcgctgcgccc

SEQ ID NO: 579 - DNA, 20 bp, Homo sapiens
ctggaagacaaagtctccca

SEQ ID NO: 580 - DNA, 17 bp, Homo sapiens
ctggggggagattggca

SEQ ID NO: 581 - DNA, 17 bp, Homo sapiens
cttgctggagtaccacg

SEQ ID NO: 582 - DNA, 19 bp, Homo sapiens
cttttttaactatccttac

SEQ ID NO: 583 - DNA, 18 bp, Homo sapiens
gaacgacccacgcgtccg

SEQ ID NO: 584 - DNA, 22 bp, Homo sapiens
gacgcgtggtcgcgacgcgtgg

SEQ ID NO: 585 - DNA, 21 bp, Homo sapiens
gatccaggtttgagggctcaa

SEQ ID NO: 586 - DNA, 18 bp, Homo sapiens
gattaacacccgcctcgt

SEQ ID NO: 587 - DNA, 22 bp, Homo sapiens
gattaacaccggcctcgtacct

SEQ ID NO: 588 - DNA, 17 bp, Homo sapiens
gatttgtgttagatcca

SEQ ID NO: 589 - DNA, 18 bp, Homo sapiens
gcagctcgacagcctcac

SEQ ID NO: 590 - DNA, 23 bp, Homo sapiens
gccacccagcctcgtacctagcc

SEQ ID NO: 591 - DNA, 17 bp, Homo sapiens
gccgattaaccaccggc

SEQ ID NO: 592 - DNA, 33 bp, Homo sapiens
gccgattcaacacccagcctcgtacctagccta

SEQ ID NO: 593 - DNA, 17 bp, Homo sapiens
gccggttacgtccatgc

SEQ ID NO: 594 - DNA, 19 bp, Homo sapiens
gcctcggccgattacacac

SEQ ID NO: 595 - DNA, 19 bp, Homo sapiens
gcctcgtactagcctaagt

SEQ ID NO: 596 - DNA, 18 bp, Homo sapiens
gcgatagcgctgaccact

SEQ ID NO: 597 - DNA, 17 bp, Homo sapiens
gcgcgcgccgcccccac

SEQ ID NO: 598 - DNA, 17 bp, Homo sapiens
gcgcggggaagcaggag

SEQ ID NO: 599 - DNA, 17 bp, Homo sapiens
gcgctcccatgcttgcg

SEQ ID NO: 600 - DNA, 17 bp, Homo sapiens
gctcccctcggccgatt

SEQ ID NO: 601 - DNA, 23 bp, Homo sapiens
gctccgagcccccgagctgggtc

SEQ ID NO: 602 - DNA, 17 bp, Homo sapiens
ggaattgccacccaggc

SEQ ID NO: 603 - DNA, 17 bp, Homo sapiens
ggccaacggtgcggtgg

SEQ ID NO: 604 - DNA, 18 bp, Homo sapiens
ggccgattaacacccgcc

SEQ ID NO: 605 - DNA, 18 bp, Homo sapiens
ggccgattaacacgcggc

SEQ ID NO: 606 - DNA, 17 bp, Homo sapiens
ggccgattaaccaccgg

SEQ ID NO: 607 - DNA, 18 bp, Homo sapiens
ggccgattaaccccgcct

SEQ ID NO: 608 - DNA, 19 bp, Homo sapiens
ggccgattaaccccggcct

SEQ ID NO: 609 - DNA, 20 bp, Homo sapiens
ggccgattcaacacccggcc

SEQ ID NO: 610 - DNA, 28 bp, Homo sapiens
ggccgattcacaccagcctcgtacctag

SEQ ID NO: 611 - DNA, 19 bp, Homo sapiens
ggccgattcaccacccgcc

SEQ ID NO: 612 - DNA, 17 bp, Homo sapiens
ggcctcgtacctagcca

SEQ ID NO: 613 - DNA, 17 bp, Homo sapiens
ggcctcgtacctagccc

SEQ ID NO: 614 - DNA, 19 bp, Homo sapiens
ggcctcgtacctagccgtt

SEQ ID NO: 615 - DNA, 22 bp, Homo sapiens
ggcctcgtacctagcctaagtt

SEQ ID NO: 616 - DNA, 17 bp, Homo sapiens
ggctttcattgccacaa

SEQ ID NO: 617 - DNA, 17 bp, Homo sapiens
gggcacctgtcggtttt

SEQ ID NO: 618 - DNA, 18 bp, Homo sapiens
gggcatgagccgggttcc

SEQ ID NO: 619 - DNA, 19 bp, Homo sapiens
ggggatggacggaaggcga

SEQ ID NO: 620 - DNA, 17 bp, Homo sapiens
ggggcacaccaggcaca

SEQ ID NO: 621 - DNA, 17 bp, Homo sapiens
ggggcccgtggacgtgg

SEQ ID NO: 622 - DNA, 17 bp, Homo sapiens
gggggggaggcccctgg

SEQ ID NO: 623 - DNA, 20 bp, Homo sapiens
ggggttccccggacgccggt

SEQ ID NO: 624 - DNA, 17 bp, Homo sapiens
gggtcttgacggaggtg

SEQ ID NO: 625 - DNA, 18 bp, Homo sapiens
gggttcagggaaacaggt

SEQ ID NO: 626 - DNA, 17 bp, Homo sapiens
ggtcgacgattttgaaa

SEQ ID NO: 627 - DNA, 21 bp, Homo sapiens
ggttacatttggagttacggt

SEQ ID NO: 628 - DNA, 17 bp, Homo sapiens
gtccggggacgcctcag

SEQ ID NO: 629 - DNA, 17 bp, Homo sapiens
gtcttgagaacgccacc

SEQ ID NO: 630 - DNA, 20 bp, Homo sapiens
gtgaggcataccactgatga

SEQ ID NO: 631 - DNA, 21 bp, Homo sapiens
gtgaggttgcagaaggctgtg

SEQ ID NO: 632 - DNA, 17 bp, Homo sapiens
gtgccgagacgatgcca

SEQ ID NO: 633 - DNA, 17 bp, Homo sapiens
gttaatatgggggtaag

SEQ ID NO: 634 - DNA, 17 bp, Homo sapiens
gttcaggtgtagcccca

SEQ ID NO: 635 - DNA, 22 bp, Homo sapiens
gttgtcaccagttccgaccaga

SEQ ID NO: 636 - DNA, 25 bp, Homo sapiens
taacacccaggcctcgtacctagcc

SEQ ID NO: 637 - DNA, 24 bp, Homo sapiens
taaccacccagcctcgtacctagc

SEQ ID NO: 638 - DNA, 17 bp, Homo sapiens
tagaaccctgcttatag

SEQ ID NO: 639 - DNA, 17 bp, Homo sapiens
tagcccccccggaggag

SEQ ID NO: 640 - DNA, 17 bp, Homo sapiens
tagctcttctcccgaga

SEQ ID NO: 641 - DNA, 21 bp, Homo sapiens
taggtctcaatcagtattctc

SEQ ID NO: 642 - DNA, 17 bp, Homo sapiens
tcaacagcgggttccac

SEQ ID NO: 643 - DNA, 22 bp, Homo sapiens
tcacacccggcctcgtacctag

SEQ ID NO: 644 - DNA, 17 bp, Homo sapiens
tccaggctatgtaacct

SEQ ID NO: 645 - DNA, 17 bp, Homo sapiens
tccgaacgcgtgggtcg

SEQ ID NO: 646 - DNA, 17 bp, Homo sapiens
tcggccgattacacccc

SEQ ID NO: 647 - DNA, 17 bp, Homo sapiens
tcggccgattaccaccg

SEQ ID NO: 648 - DNA, 17 bp, Homo sapiens
tcgtacctagccgtaat

SEQ ID NO: 649 - DNA, 17 bp, Homo sapiens
tcgtacctagccgtata

SEQ ID NO: 650 - DNA, 17 bp, Homo sapiens
tcgtgccgagattcgcc

SEQ ID NO: 651 - DNA, 18 bp, Homo sapiens
tcgttgtacccttgatga

SEQ ID NO: 652 - DNA, 19 bp, Homo sapiens
tcgttgttacccgttgatg

SEQ ID NO: 653 - DNA, 18 bp, Homo sapiens
tctgttgtgtgtttgttt

SEQ ID NO: 654 - DNA, 18 bp, Homo sapiens
tcttacgaagacatcatg

SEQ ID NO: 655 - DNA, 17 bp, Homo sapiens
tcttatgccaattctta

SEQ ID NO: 656 - DNA, 18 bp, Homo sapiens
tcttccagtaggggaatt

SEQ ID NO: 657 - DNA, 17 bp, Homo sapiens
tctttggcttgcaaaca

SEQ ID NO: 658 - DNA, 22 bp, Homo sapiens
tgagtgtaacaggagattaaca

SEQ ID NO: 659 - DNA, 17 bp, Homo sapiens
tgatcttgagcgctgtt

SEQ ID NO: 660 - DNA, 17 bp, Homo sapiens
tggagttgcctctatct

SEQ ID NO: 661 - DNA, 17 bp, Homo sapiens
tggtctacgagtgtcag

SEQ ID NO: 662 - DNA, 22 bp, Homo sapiens
tgtaacaggagattaacagagg

SEQ ID NO: 663 - DNA, 19 bp, Homo sapiens
tgtaggatccatccagacc

SEQ ID NO: 664 - DNA, 20 bp, Homo sapiens
tgtgtgctaacacacatagc

SEQ ID NO: 665 - DNA, 19 bp, Homo sapiens
tgtttggtgtgagatggat

SEQ ID NO: 666 - DNA, 21 bp, Homo sapiens
ttcacaccagcctcgtactag

SEQ ID NO: 667 - DNA, 17 bp, Homo sapiens
ttcaggaaagccatttt

SEQ ID NO: 668 - DNA, 17 bp, Homo sapiens
ttcccgggaaccttctc

SEQ ID NO: 669 - DNA, 17 bp, Homo sapiens
ttcgctcagcctgggct

SEQ ID NO: 670 - DNA, 17 bp, Homo sapiens
ttctcccatcaacatct

SEQ ID NO: 671 - DNA, 17 bp, Homo sapiens
ttctggaaggggtcctg

SEQ ID NO: 672 - DNA, 17 bp, Homo sapiens
ttgaattcgccacccag

SEQ ID NO: 673 - DNA, 17 bp, Homo sapiens
ttggacgaattgttgta

SEQ ID NO: 674 - DNA, 17 bp, Homo sapiens
ttgtttgaagtttttgt

SEQ ID NO: 675 - DNA, 17 bp, Homo sapiens
tttccgatttcccttct

SEQ ID NO: 676 - DNA, 18 bp, Homo sapiens
ttttctaccgccagtcag

SEQ ID NO: 677 - DNA, 19 bp, Homo sapiens
aaaaagcggggtcagggaa

SEQ ID NO: 678 - DNA, 21 bp, Homo sapiens
aaaacccagcctcgtacctag

SEQ ID NO: 679 - DNA, 22 bp, Homo sapiens
aaaacccagcctcgtacctagc

SEQ ID NO: 680 - DNA, 20 bp, Homo sapiens
aaaagcccaaacttgcagag

SEQ ID NO: 681 - DNA, 17 bp, Homo sapiens
aaaaggcgcgggcccca

SEQ ID NO: 682 - DNA, 17 bp, Homo sapiens
aaaagggcgggcaaggg

SEQ ID NO: 683 - DNA, 25 bp, Homo sapiens
aacacccagcctcgtacctagccct

SEQ ID NO: 684 - DNA, 21 bp, Homo sapiens
aacacccgcctcgtacctagc

SEQ ID NO: 685 - DNA, 19 bp, Homo sapiens
aacacgcggcctcgtacct

SEQ ID NO: 686 - DNA, 17 bp, Homo sapiens
aaccgacccacgcgtcc

SEQ ID NO: 687 - DNA, 17 bp, Homo sapiens
aagatcagtagcctcag

SEQ ID NO: 688 - DNA, 17 bp, Homo sapiens
aagatccccgcctgtcc

SEQ ID NO: 689 - DNA, 18 bp, Homo sapiens
aagggctgatggtactta

SEQ ID NO: 690 - DNA, 17 bp, Homo sapiens
acaccaggcctctacta

SEQ ID NO: 691 - DNA, 22 bp, Homo sapiens
acacccagcctcgtacctagca

SEQ ID NO: 692 - DNA, 28 bp, Homo sapiens
acacccagcctcgtacctagcctaagtt

SEQ ID NO: 693 - DNA, 25 bp, Homo sapiens
acacccaggcctcgtacctagccga

SEQ ID NO: 694 - DNA, 19 bp, Homo sapiens
acacccagtcctcgtacct

SEQ ID NO: 695 - DNA, 17 bp, Homo sapiens
acacccggcctcgctac

SEQ ID NO: 696 - DNA, 36 bp, Homo sapiens
acacgcagccaggtcggatattgggtgcattcagtc

SEQ ID NO: 697 - DNA, 17 bp, Homo sapiens
acacttcagaccagtct

SEQ ID NO: 698 - DNA, 17 bp, Homo sapiens
acagcttcttctgttca

SEQ ID NO: 699 - DNA, 18 bp, Homo sapiens
acatcacggatgtaagca

SEQ ID NO: 700 - DNA, 17 bp, Homo sapiens
acatcactagacaactg

SEQ ID NO: 701 - DNA, 24 bp, Homo sapiens
accacccagcctcgtacctagccc

SEQ ID NO: 702 - DNA, 26 bp, Homo sapiens
accacccagcctcgtacctagcctaa

SEQ ID NO: 703 - DNA, 18 bp, Homo sapiens
accacccgcctcgtacta

SEQ ID NO: 704 - DNA, 20 bp, Homo sapiens
accaggccagcagttctcct

SEQ ID NO: 705 - DNA, 17 bp, Homo sapiens
accagggcccgttgggt

SEQ ID NO: 706 - DNA, 17 bp, Homo sapiens
accattccgaccagata

SEQ ID NO: 707 - DNA, 28 bp, Homo sapiens
acccagcctcgtacctagcctaagtttt

SEQ ID NO: 708 - DNA, 22 bp, Homo sapiens
acccaggcctcgtaccttagcc

SEQ ID NO: 709 - DNA, 18 bp, Homo sapiens
acccaggctcgtactagc

SEQ ID NO: 710 - DNA, 19 bp, Homo sapiens
acccggcctcgcacctagc

SEQ ID NO: 711 - DNA, 24 bp, Homo sapiens
acccggcctcgtacctagccgtaa

SEQ ID NO: 712 - DNA, 17 bp, Homo sapiens
accctaacttggccccc

SEQ ID NO: 713 - DNA, 18 bp, Homo sapiens
accctcggccgattacac

SEQ ID NO: 714 - DNA, 18 bp, Homo sapiens
accgagcctcgtacctag

SEQ ID NO: 715 - DNA, 17 bp, Homo sapiens
accgtggactggagcaa

SEQ ID NO: 716 - DNA, 18 bp, Homo sapiens
acgaaagagacccatagc

SEQ ID NO: 717 - DNA, 20 bp, Homo sapiens
acgaccgtcctcgccaggcg

SEQ ID NO: 718 - DNA, 21 bp, Homo sapiens
acgaccgtcctcgccaggcgg

SEQ ID NO: 719 - DNA, 17 bp, Homo sapiens
acgagcctcggccgatt

SEQ ID NO: 720 - DNA, 17 bp, Homo sapiens
acgattggtgtagaacc

SEQ ID NO: 721 - DNA, 25 bp, Homo sapiens
acgcgtgggtccgacgcgtgggtcg

SEQ ID NO: 722 - DNA, 18 bp, Homo sapiens
acggcagtcagggtccac

SEQ ID NO: 723 - DNA, 19 bp, Homo sapiens
acgggggctcgcgccggac

SEQ ID NO: 724 - DNA, 18 bp, Homo sapiens
acggtaacagcctggcag

SEQ ID NO: 725 - DNA, 22 bp, Homo sapiens
actcaaaagggaggacagcaga

SEQ ID NO: 726 - DNA, 19 bp, Homo sapiens
agaatggttctcgatgatg

SEQ ID NO: 727 - DNA, 17 bp, Homo sapiens
agcaggcgtcaggaggg

SEQ ID NO: 728 - DNA, 18 bp, Homo sapiens
agcctcgacctagcctaa

SEQ ID NO: 729 - DNA, 17 bp, Homo sapiens
agcctcgcacctagccg

SEQ ID NO: 730 - DNA, 18 bp, Homo sapiens
agcctcgcacctagccta

SEQ ID NO: 731 - DNA, 21 bp, Homo sapiens
agcctcgctaccttaaaccgt

SEQ ID NO: 732 - DNA, 22 bp, Homo sapiens
agcctcgtacctagcctaattt

SEQ ID NO: 733 - DNA, 24 bp, Homo sapiens
agcgatgtggctcggtctggcgac

SEQ ID NO: 734 - DNA, 26 bp, Homo sapiens
agcgatgtggctcggtctggcgacgc

SEQ ID NO: 735 - DNA, 17 bp, Homo sapiens
agctcaggtgggttagc

SEQ ID NO: 736 - DNA, 20 bp, Homo sapiens
agcttttttaactatcctta

SEQ ID NO: 737 - DNA, 17 bp, Homo sapiens
aggaccggactccacct

SEQ ID NO: 738 - DNA, 17 bp, Homo sapiens
aggcaccagttgtctga

SEQ ID NO: 739 - DNA, 17 bp, Homo sapiens
aggcctcgacctagcca

SEQ ID NO: 740 - DNA, 20 bp, Homo sapiens
aggcctcgtacctagcctta

SEQ ID NO: 741 - DNA, 18 bp, Homo sapiens
aggctttcatggacgatt

SEQ ID NO: 742 - DNA, 17 bp, Homo sapiens
aggttcttaggaaatgg

SEQ ID NO: 743 - DNA, 17 bp, Homo sapiens
agtcctcgtacctagcc

SEQ ID NO: 744 - DNA, 17 bp, Homo sapiens
agttctctaccctccag

SEQ ID NO: 745 - DNA, 18 bp, Homo sapiens
ataatgagtgcacacacc

SEQ ID NO: 746 - DNA, 18 bp, Homo sapiens
atacatctccttcagagt

SEQ ID NO: 747 - DNA, 17 bp, Homo sapiens
ataggaaacttgggaaa

SEQ ID NO: 748 - DNA, 17 bp, Homo sapiens
atcaatgatctcctgat

SEQ ID NO: 749 - DNA, 17 bp, Homo sapiens
atccatccagaccctca

SEQ ID NO: 750 - DNA, 18 bp, Homo sapiens
atctgaaatgcttcaact

SEQ ID NO: 751 - DNA, 17 bp, Homo sapiens
atgaccctcggccgatt

SEQ ID NO: 752 - DNA, 19 bp, Homo sapiens
atgagaaagatcaggtgcg

SEQ ID NO: 753 - DNA, 19 bp, Homo sapiens
atgtcccgcgtgcttgaaa

SEQ ID NO: 754 - DNA, 17 bp, Homo sapiens
atgtggtcccatcgtcc

SEQ ID NO: 755 - DNA, 17 bp, Homo sapiens
attaacacccggcctct

SEQ ID NO: 756 - DNA, 28 bp, Homo sapiens
attcacacccagcctcgtacctagccta

SEQ ID NO: 757 - DNA, 22 bp, Homo sapiens
attcacacccagcctcgtacta

SEQ ID NO: 758 - DNA, 17 bp, Homo sapiens
attctctagaagtgaga

SEQ ID NO: 759 - DNA, 21 bp, Homo sapiens
attctgggtactcggaggaaa

SEQ ID NO: 760 - DNA, 18 bp, Homo sapiens
attggcattgccagggca

SEQ ID NO: 761 - DNA, 17 bp, Homo sapiens
caaattcgtagagagct

SEQ ID NO: 762 - DNA, 25 bp, Homo sapiens
caacacccagcctcgtacctagccg

SEQ ID NO: 763 - DNA, 27 bp, Homo sapiens
caacacccagcctcgtacctagccgta

SEQ ID NO: 764 - DNA, 26 bp, Homo sapiens
caacacccagcctcgtacctagcctt

SEQ ID NO: 765 - DNA, 18 bp, Homo sapiens
caaccccagcctcgtact

SEQ ID NO: 766 - DNA, 17 bp, Homo sapiens
caagggggggggaaaga

SEQ ID NO: 767 - DNA, 17 bp, Homo sapiens
cacacagggcacacagg

SEQ ID NO: 768 - DNA, 24 bp, Homo sapiens
cacactttgtccagcagcttcctc

SEQ ID NO: 769 - DNA, 20 bp, Homo sapiens
caccagtagcagattaaatc

SEQ ID NO: 770 - DNA, 23 bp, Homo sapiens
cacccagcctcgtacctagccga

SEQ ID NO: 771 - DNA, 28 bp, Homo sapiens
cacccagcctcgtacctagccgtaagtt

SEQ ID NO: 772 - DNA, 21 bp, Homo sapiens
cacccagcctcgtacctagcg

SEQ ID NO: 773 - DNA, 26 bp, Homo sapiens
cacccaggcctcgtacctagccgtaa

SEQ ID NO: 774 - DNA, 17 bp, Homo sapiens
cacgcctcgctacctag

SEQ ID NO: 775 - DNA, 17 bp, Homo sapiens
cactggaacccagtggc

SEQ ID NO: 776 - DNA, 19 bp, Homo sapiens
cagacacggcaacatgcgg

SEQ ID NO: 777 - DNA, 18 bp, Homo sapiens
cagagtgagacccattct

SEQ ID NO: 778 - DNA, 18 bp, Homo sapiens
cagcctctacctagcctt

SEQ ID NO: 779 - DNA, 20 bp, Homo sapiens
cagcgctcaagatcatcagc

SEQ ID NO: 780 - DNA, 17 bp, Homo sapiens
cagggcaccgcctgttt

SEQ ID NO: 781 - DNA, 17 bp, Homo sapiens
caggttattcttctcgg

SEQ ID NO: 782 - DNA, 42 bp, Homo sapiens
catacctggcctagaccagtgcccataacacacgtacgaggc

SEQ ID NO: 783 - DNA, 43 bp, Homo sapiens
catacctggcctagaccagtgcccataacacacgtacgaggca

SEQ ID NO: 784 - DNA, 17 bp, Homo sapiens
catcatcactgcacctc

SEQ ID NO: 785 - DNA, 18 bp, Homo sapiens
cattatagatgatcacgg

SEQ ID NO: 786 - DNA, 25 bp, Homo sapiens
ccaacacccagcctcgtacctagcc

SEQ ID NO: 787 - DNA, 20 bp, Homo sapiens
ccaaccccgtagtcctcctc

SEQ ID NO: 788 - DNA, 17 bp, Homo sapiens
ccacacagagagggaga

SEQ ID NO: 789 - DNA, 38 bp, Homo sapiens
ccaccaactagtgaacgagttttcgacgagtgggatgc

SEQ ID NO: 790 - DNA, 24 bp, Homo sapiens
ccacccagcctcgtacctagccga

SEQ ID NO: 791 - DNA, 25 bp, Homo sapiens
ccacccagcctcgtacctagccgta

SEQ ID NO: 792 - DNA, 25 bp, Homo sapiens
ccacccagcctcgtacctagccgtt

SEQ ID NO: 793 - DNA, 25 bp, Homo sapiens
ccacccagcctcgtacctagcctta

SEQ ID NO: 794 - DNA, 17 bp, Homo sapiens
ccaccggccccggatgc

SEQ ID NO: 795 - DNA, 19 bp, Homo sapiens
ccagaggttttctgatctc

SEQ ID NO: 796 - DNA, 25 bp, Homo sapiens
ccagcctcgtacctagccttaagtt

SEQ ID NO: 797 - DNA, 17 bp, Homo sapiens
ccagctgagaatccctc

SEQ ID NO: 798 - DNA, 18 bp, Homo sapiens
ccaggctcgctcctagac

SEQ ID NO: 799 - DNA, 19 bp, Homo sapiens
ccagggggcatcgggcctt

SEQ ID NO: 800 - DNA, 17 bp, Homo sapiens
ccataggcatagccacg

SEQ ID NO: 801 - DNA, 17 bp, Homo sapiens
ccatggaacaacttgaa

SEQ ID NO: 802 - DNA, 17 bp, Homo sapiens
cccaaagggcggccgct

SEQ ID NO: 803 - DNA, 18 bp, Homo sapiens
cccagcctcctacctagc

SEQ ID NO: 804 - DNA, 25 bp, Homo sapiens
cccagcctcgtacctagccgaagtt

SEQ ID NO: 805 - DNA, 18 bp, Homo sapiens
cccagctcgtactagcct

SEQ ID NO: 806 - DNA, 19 bp, Homo sapiens
cccagctcgtactagccta

SEQ ID NO: 807 - DNA, 23 bp, Homo sapiens
ccccaggcctcgtacctagccta

SEQ ID NO: 808 - DNA, 17 bp, Homo sapiens
ccccagggaaagagctt

SEQ ID NO: 809 - DNA, 17 bp, Homo sapiens
ccccatttttttcccgg

SEQ ID NO: 810 - DNA, 27 bp, Homo sapiens
cccctgaacactcataatctgatttct

SEQ ID NO: 811 - DNA, 17 bp, Homo sapiens
cccctgaggggccccca

SEQ ID NO: 812 - DNA, 19 bp, Homo sapiens
cccggcctcgcacctagcc

SEQ ID NO: 813 - DNA, 20 bp, Homo sapiens
cccggcctcgctacctagcc

SEQ ID NO: 814 - DNA, 17 bp, Homo sapiens
ccctctctctttgttgt

SEQ ID NO: 815 - DNA, 17 bp, Homo sapiens
ccctgcggtagggcccg

SEQ ID NO: 816 - DNA, 17 bp, Homo sapiens
cccttgacaaaaactgg

SEQ ID NO: 817 - DNA, 19 bp, Homo sapiens
cccttttccccctggtcac

SEQ ID NO: 818 - DNA, 17 bp, Homo sapiens
ccgattaacacgcggcc

SEQ ID NO: 819 - DNA, 18 bp, Homo sapiens
ccgattaacacgggcctc

SEQ ID NO: 820 - DNA, 21 bp, Homo sapiens
ccgattacacacccagcctcg

SEQ ID NO: 821 - DNA, 20 bp, Homo sapiens
ccgcagagccgttgctcacc

SEQ ID NO: 822 - DNA, 17 bp, Homo sapiens
ccgccctcaggtttatt

SEQ ID NO: 823 - DNA, 19 bp, Homo sapiens
ccgcctcgtacctagccgt

SEQ ID NO: 824 - DNA, 19 bp, Homo sapiens
ccggcctcgcacctagcct

SEQ ID NO: 825 - DNA, 18 bp, Homo sapiens
ccggcctcgctacctagc

SEQ ID NO: 826 - DNA, 20 bp, Homo sapiens
cctagccaggggccagcacg

SEQ ID NO: 827 - DNA, 19 bp, Homo sapiens
cctcacagcgtgttccact

SEQ ID NO: 828 - DNA, 17 bp, Homo sapiens
cctcgccgattcacccc

SEQ ID NO: 829 - DNA, 19 bp, Homo sapiens
cctcgctaccttaaaccgt

SEQ ID NO: 830 - DNA, 24 bp, Homo sapiens
cctcggccgattaaccaccggcct

SEQ ID NO: 831 - DNA, 21 bp, Homo sapiens
cctcggccgattaccacccag

SEQ ID NO: 832 - DNA, 38 bp, Homo sapiens
cctcggccgattcaaacccagcctcgtacctagccgta

SEQ ID NO: 833 - DNA, 23 bp, Homo sapiens
cctcggccgattcacaccaggcc

SEQ ID NO: 834 - DNA, 18 bp, Homo sapiens
cctcggccgattccacac

SEQ ID NO: 835 - DNA, 18 bp, Homo sapiens
cctcggccgatttaccac

SEQ ID NO: 836 - DNA, 19 bp, Homo sapiens
cctcggtgccgattcaacc

SEQ ID NO: 837 - DNA, 17 bp, Homo sapiens
cctcggtttcaagtgtt

SEQ ID NO: 838 - DNA, 17 bp, Homo sapiens
cctcgtacctagccata

SEQ ID NO: 839 - DNA, 19 bp, Homo sapiens
cctcgtacctagcctattt

SEQ ID NO: 840 - DNA, 17 bp, Homo sapiens
cctcgtacctagcctga

SEQ ID NO: 841 - DNA, 18 bp, Homo sapiens
cctcgtccgattaacccg

SEQ ID NO: 842 - DNA, 19 bp, Homo sapiens
cctcgtccgattaacccgg

SEQ ID NO: 843 - DNA, 17 bp, Homo sapiens
cctcgtccgattaccac

SEQ ID NO: 844 - DNA, 18 bp, Homo sapiens
cctcgtccgattaccacc

SEQ ID NO: 845 - DNA, 17 bp, Homo sapiens
cctcgtccgattcaacc

SEQ ID NO: 846 - DNA, 21 bp, Homo sapiens
cctcgtccgattcacacccgg

SEQ ID NO: 847 - DNA, 18 bp, Homo sapiens
cctcgtccgattcaccac

SEQ ID NO: 848 - DNA, 20 bp, Homo sapiens
cctcgtccgattcacccccg

SEQ ID NO: 849 - DNA, 21 bp, Homo sapiens
cctcgtgccgaaatgccaccc

SEQ ID NO: 850 - DNA, 23 bp, Homo sapiens
cctcgtgccgaaatgccacccag

SEQ ID NO: 851 - DNA, 19 bp, Homo sapiens
cctcgttggagtcacctca

SEQ ID NO: 852 - DNA, 20 bp, Homo sapiens
cctcgttggagtcacctcat

SEQ ID NO: 853 - DNA, 17 bp, Homo sapiens
cctgagcaaacctgagc

SEQ ID NO: 854 - DNA, 18 bp, Homo sapiens
cctggccccggtcattct

SEQ ID NO: 855 - DNA, 17 bp, Homo sapiens
cctttcaccagtggaag

SEQ ID NO: 856 - DNA, 18 bp, Homo sapiens
cgaaacctcacgcggaag

SEQ ID NO: 857 - DNA, 27 bp, Homo sapiens
cgacacccagcctcgtacctagccgta

SEQ ID NO: 858 - DNA, 28 bp, Homo sapiens
cgattaacaccaggcctcgtacctagcc

SEQ ID NO: 859 - DNA, 18 bp, Homo sapiens
cgatttgtgttagatcca

SEQ ID NO: 860 - DNA, 18 bp, Homo sapiens
cgatttgtgttagatgca

SEQ ID NO: 861 - DNA, 17 bp, Homo sapiens
cgatttgttggtaggat

SEQ ID NO: 862 - DNA, 17 bp, Homo sapiens
cgcaggacctctgctca

SEQ ID NO: 863 - DNA, 25 bp, Homo sapiens
cgccacccagcctcgtacctagccg

SEQ ID NO: 864 - DNA, 19 bp, Homo sapiens
cgcggaacgcagaggaacc

SEQ ID NO: 865 - DNA, 17 bp, Homo sapiens
cgctgccatccgcccag

SEQ ID NO: 866 - DNA, 17 bp, Homo sapiens
cggaaagccacccaggc

SEQ ID NO: 867 - DNA, 19 bp, Homo sapiens
cggaagcccatcccagtga

SEQ ID NO: 868 - DNA, 17 bp, Homo sapiens
cggaatcccacccaggc

SEQ ID NO: 869 - DNA, 25 bp, Homo sapiens
cggacgcggggtcgacgattccgaa

SEQ ID NO: 870 - DNA, 17 bp, Homo sapiens
cggccgattcaaacacc

SEQ ID NO: 871 - DNA, 26 bp, Homo sapiens
cggccgattcaccaccagcctcgtac

SEQ ID NO: 872 - DNA, 19 bp, Homo sapiens
cggcctcgcacctagccta

SEQ ID NO: 873 - DNA, 17 bp, Homo sapiens
cggcggacccacgcgtc

SEQ ID NO: 874 - DNA, 18 bp, Homo sapiens
cgggcgcagccgacgctc

SEQ ID NO: 875 - DNA, 17 bp, Homo sapiens
cgggtcccggcggacgc

SEQ ID NO: 876 - DNA, 17 bp, Homo sapiens
cgtacagcccagagtga

SEQ ID NO: 877 - DNA, 17 bp, Homo sapiens
cgtacctagcctatgtt

SEQ ID NO: 878 - DNA, 18 bp, Homo sapiens
cgtccgctagaactagtc

SEQ ID NO: 879 - DNA, 45 bp, Homo sapiens
cgtcgctgcgcaccttgcactggaaggacgtggtccccccgaagt

SEQ ID NO: 880 - DNA, 17 bp, Homo sapiens
cgtctgagtcatcatat

SEQ ID NO: 881 - DNA, 17 bp, Homo sapiens
cgtggtctcgggcagct

SEQ ID NO: 882 - DNA, 21 bp, Homo sapiens
ctaagagtcgagcctcggccg

SEQ ID NO: 883 - DNA, 18 bp, Homo sapiens
ctccacagtctgaggcct

SEQ ID NO: 884 - DNA, 17 bp, Homo sapiens
ctcgacccggaccgctc

SEQ ID NO: 885 - DNA, 17 bp, Homo sapiens
ctcgctacctagccgtt

SEQ ID NO: 886 - DNA, 17 bp, Homo sapiens
ctcggccgataaccacc

SEQ ID NO: 887 - DNA, 26 bp, Homo sapiens
ctcggccgattaacaccggcctcgta

SEQ ID NO: 888 - DNA, 24 bp, Homo sapiens
ctcggccgattaaccaccggcctc

SEQ ID NO: 889 - DNA, 21 bp, Homo sapiens
ctcggccgattaacccccggc

SEQ ID NO: 890 - DNA, 21 bp, Homo sapiens
ctcggccgattacccccagcc

SEQ ID NO: 891 - DNA, 17 bp, Homo sapiens
ctcggccgatttcaacc

SEQ ID NO: 892 - DNA, 17 bp, Homo sapiens
ctcgtacctagacctat

SEQ ID NO: 893 - DNA, 20 bp, Homo sapiens
ctcgtacctagccgtaaggt

SEQ ID NO: 894 - DNA, 17 bp, Homo sapiens
ctcgtactagccgtaat

SEQ ID NO: 895 - DNA, 17 bp, Homo sapiens
ctcgtactagcctaatt

SEQ ID NO: 896 - DNA, 17 bp, Homo sapiens
ctcgtccgattcaccac

SEQ ID NO: 897 - DNA, 18 bp, Homo sapiens
ctcgtccgattcaccccc

SEQ ID NO: 898 - DNA, 17 bp, Homo sapiens
ctcgtccgatttacacc

SEQ ID NO: 899 - DNA, 24 bp, Homo sapiens
ctcgtcttgagacgccacccaggc

SEQ ID NO: 900 - DNA, 25 bp, Homo sapiens
ctcttgacacaaactgagtgctcac

SEQ ID NO: 901 - DNA, 18 bp, Homo sapiens
ctgagaatccctcgaggg

SEQ ID NO: 902 - DNA, 18 bp, Homo sapiens
ctgtactgagtgtctcca

SEQ ID NO: 903 - DNA, 18 bp, Homo sapiens
ctgtccatgatgaccaca

SEQ ID NO: 904 - DNA, 19 bp, Homo sapiens
ctgtccatgatgaccacac

SEQ ID NO: 905 - DNA, 18 bp, Homo sapiens
ctgtttgcttgtggtgca

SEQ ID NO: 906 - DNA, 17 bp, Homo sapiens
cttaactccagtaatag

SEQ ID NO: 907 - DNA, 21 bp, Homo sapiens
cttacttgcgcagtctcatcg

SEQ ID NO: 908 - DNA, 19 bp, Homo sapiens
cttagcccagcttgggaag

SEQ ID NO: 909 - DNA, 18 bp, Homo sapiens
cttagttcgagttgtcca

SEQ ID NO: 910 - DNA, 17 bp, Homo sapiens
cttcccatgggggggtc

SEQ ID NO: 911 - DNA, 17 bp, Homo sapiens
cttcctggtgtcaggaa

SEQ ID NO: 912 - DNA, 17 bp, Homo sapiens
cttcttggaaggttgga

SEQ ID NO: 913 - DNA, 19 bp, Homo sapiens
cttgcgcttaactcagcaa

SEQ ID NO: 914 - DNA, 18 bp, Homo sapiens
gaaactggagtcctggca

SEQ ID NO: 915 - DNA, 17 bp, Homo sapiens
gacaaccacacattctt

SEQ ID NO: 916 - DNA, 17 bp, Homo sapiens
gacaacttgtgatgtca

SEQ ID NO: 917 - DNA, 21 bp, Homo sapiens
gacagagggtcacatccagct

SEQ ID NO: 918 - DNA, 18 bp, Homo sapiens
gacagcacaccctgggga

SEQ ID NO: 919 - DNA, 17 bp, Homo sapiens
gacagccttgggtcctg

SEQ ID NO: 920 - DNA, 17 bp, Homo sapiens
gaccattgagggcagca

SEQ ID NO: 921 - DNA, 33 bp, Homo sapiens
gagcagagctcttgacacaaactgagtgctcac

SEQ ID NO: 922 - DNA, 17 bp, Homo sapiens
gagcgcgaggcggaggc

SEQ ID NO: 923 - DNA, 17 bp, Homo sapiens
gagggacataaaaccaa

SEQ ID NO: 924 - DNA, 17 bp, Homo sapiens
gagggcacgccgcgcca

SEQ ID NO: 925 - DNA, 18 bp, Homo sapiens
gataccacatgcagaatg

SEQ ID NO: 926 - DNA, 18 bp, Homo sapiens
gatccagcttgcccgtcc

SEQ ID NO: 927 - DNA, 17 bp, Homo sapiens
gatgggcacgatgccat

SEQ ID NO: 928 - DNA, 18 bp, Homo sapiens
gcaattcgccacccaggc

SEQ ID NO: 929 - DNA, 17 bp, Homo sapiens
gcactcaaccccctgga

SEQ ID NO: 930 - DNA, 17 bp, Homo sapiens
gcagcgtgaggaaccag

SEQ ID NO: 931 - DNA, 17 bp, Homo sapiens
gcaggggggcagcccgc

SEQ ID NO: 932 - DNA, 17 bp, Homo sapiens
gcaggtacacgtgcctt

SEQ ID NO: 933 - DNA, 17 bp, Homo sapiens
gcagtcacgagggtgca

SEQ ID NO: 934 - DNA, 17 bp, Homo sapiens
gcatcaaagtgcctgcg

SEQ ID NO: 935 - DNA, 23 bp, Homo sapiens
gccacccagcctcgtacctagac

SEQ ID NO: 936 - DNA, 24 bp, Homo sapiens
gccacccagcctcgtacctagccg

SEQ ID NO: 937 - DNA, 17 bp, Homo sapiens
gccagacccacgcgtcc

SEQ ID NO: 938 - DNA, 18 bp, Homo sapiens
gccagccccccctccccc

SEQ ID NO: 939 - DNA, 17 bp, Homo sapiens
gcccgtatggccgaaga

SEQ ID NO: 940 - DNA, 17 bp, Homo sapiens
gccctcggtgccgatta

SEQ ID NO: 941 - DNA, 18 bp, Homo sapiens
gccgaattaacaccaggc

SEQ ID NO: 942 - DNA, 18 bp, Homo sapiens
gccgattcacaccgcctc

SEQ ID NO: 943 - DNA, 18 bp, Homo sapiens
gccgcccccgtcgcgcgc

SEQ ID NO: 944 - DNA, 17 bp, Homo sapiens
gccgcgtagctgacccc

SEQ ID NO: 945 - DNA, 17 bp, Homo sapiens
gccgtcctccaactgga

SEQ ID NO: 946 - DNA, 17 bp, Homo sapiens
gcctcggccgataacac

SEQ ID NO: 947 - DNA, 19 bp, Homo sapiens
gcctcggccgattacaccc

SEQ ID NO: 948 - DNA, 37 bp, Homo sapiens
gcctcggccgattcaacacccagcctcgtacctagcc

SEQ ID NO: 949 - DNA, 22 bp, Homo sapiens
gcctcggccgattcacacccgg

SEQ ID NO: 950 - DNA, 17 bp, Homo sapiens
gcctcgtacctagacta

SEQ ID NO: 951 - DNA, 17 bp, Homo sapiens
gcctcgtacctagctta

SEQ ID NO: 952 - DNA, 17 bp, Homo sapiens
gcctcgtccgatcaccc

SEQ ID NO: 953 - DNA, 17 bp, Homo sapiens
gcctcgtccgattaccc

SEQ ID NO: 954 - DNA, 17 bp, Homo sapiens
gcctgggtgctggctgg

SEQ ID NO: 955 - DNA, 18 bp, Homo sapiens
gcgattgccacagagttc

SEQ ID NO: 956 - DNA, 18 bp, Homo sapiens
gcgggcctcgtagcaggc

SEQ ID NO: 957 - DNA, 23 bp, Homo sapiens
gcgtgggtccgacgcgtgggtcg

SEQ ID NO: 958 - DNA, 17 bp, Homo sapiens
gctgccgagggtgaggg

SEQ ID NO: 959 - DNA, 17 bp, Homo sapiens
gctggaattctgtgtac

SEQ ID NO: 960 - DNA, 17 bp, Homo sapiens
gctgtcaaaactgtaaa

SEQ ID NO: 961 - DNA, 17 bp, Homo sapiens
gctgtgcgcacattctg

SEQ ID NO: 962 - DNA, 52 bp, Homo sapiens
gcttccggtgtcatagctgtgggatccggaagtaaaaacacaagccccgccc

SEQ ID NO: 963 - DNA, 53 bp, Homo sapiens
gcttccggtgtcatagctgtgggatccggaagtaaaaacacaagccccgcccc

SEQ ID NO: 964 - DNA, 17 bp, Homo sapiens
gcttgtgcatcttgttg

SEQ ID NO: 965 - DNA, 17 bp, Homo sapiens
ggaaagggcccattgcc

SEQ ID NO: 966 - DNA, 17 bp, Homo sapiens
ggaactctgttggtcta

SEQ ID NO: 967 - DNA, 18 bp, Homo sapiens
ggacgagcgctcgatgaa

SEQ ID NO: 968 - DNA, 21 bp, Homo sapiens
ggacgggggctcgcgccggac

SEQ ID NO: 969 - DNA, 17 bp, Homo sapiens
ggataccccccagggtc

SEQ ID NO: 970 - DNA, 18 bp, Homo sapiens
ggattcatcccgtggtca

SEQ ID NO: 971 - DNA, 17 bp, Homo sapiens
ggcacagggtcatgctt

SEQ ID NO: 972 - DNA, 17 bp, Homo sapiens
ggcatgccaccttacgg

SEQ ID NO: 973 - DNA, 18 bp, Homo sapiens
ggcccttgacaaaaccgg

SEQ ID NO: 974 - DNA, 21 bp, Homo sapiens
ggccgattaacacccgcctcg

SEQ ID NO: 975 - DNA, 23 bp, Homo sapiens
ggcctcgtacctagcctaagttt

SEQ ID NO: 976 - DNA, 17 bp, Homo sapiens
ggcctgccagaagcaca

SEQ ID NO: 977 - DNA, 21 bp, Homo sapiens
ggcctgtttgcttgtggtgca

SEQ ID NO: 978 - DNA, 18 bp, Homo sapiens
ggctgagacattacaaca

SEQ ID NO: 979 - DNA, 17 bp, Homo sapiens
ggctggacccccacggg

SEQ ID NO: 980 - DNA, 17 bp, Homo sapiens
gggaccggaagccatcc

SEQ ID NO: 981 - DNA, 18 bp, Homo sapiens
gggaggcgggacggtcgg

SEQ ID NO: 982 - DNA, 19 bp, Homo sapiens
gggccaggacgtgttacag

SEQ ID NO: 983 - DNA, 17 bp, Homo sapiens
gggctgggcattgccct

SEQ ID NO: 984 - DNA, 17 bp, Homo sapiens
gggctgtccgcggaccc

SEQ ID NO: 985 - DNA, 18 bp, Homo sapiens
ggggtttggggaaagggg

SEQ ID NO: 986 - DNA, 25 bp, Homo sapiens
gggtattcttgctcggatcttgctg

SEQ ID NO: 987 - DNA, 17 bp, Homo sapiens
gggttgtggccatatct

SEQ ID NO: 988 - DNA, 20 bp, Homo sapiens
ggtggaagggtgcagtcatc

SEQ ID NO: 989 - DNA, 17 bp, Homo sapiens
ggttgggataaagtttc

SEQ ID NO: 990 - DNA, 17 bp, Homo sapiens
gtaaaggccttcgttcg

SEQ ID NO: 991 - DNA, 25 bp, Homo sapiens
gtaacacccagcctcgtacctagcc

SEQ ID NO: 992 - DNA, 19 bp, Homo sapiens
gtaacacccggcctcgtac

SEQ ID NO: 993 - DNA, 18 bp, Homo sapiens
gtacctagccgtagtttt

SEQ ID NO: 994 - DNA, 17 bp, Homo sapiens
gtactcagaaaggtcct

SEQ ID NO: 995 - DNA, 18 bp, Homo sapiens
gtagcacagcttttccct

SEQ ID NO: 996 - DNA, 18 bp, Homo sapiens
gtatataaccatcagcac

SEQ ID NO: 997 - DNA, 17 bp, Homo sapiens
gtcaggactccgatagg

SEQ ID NO: 998 - DNA, 18 bp, Homo sapiens
gtccagaccttcaaccag

SEQ ID NO: 999 - DNA, 20 bp, Homo sapiens
gtccgggagggtggatgcgg

SEQ ID NO: 1000 - DNA, 19 bp, Homo sapiens
gtctatgttcttgttgcta

SEQ ID NO: 1001 - DNA, 25 bp, Homo sapiens
gtctcctcccttgtgcccagaccca

SEQ ID NO: 1002 - DNA, 17 bp, Homo sapiens
gtctgatatcagataca

SEQ ID NO: 1003 - DNA, 17 bp, Homo sapiens
gtcttcagcagctccgg

SEQ ID NO: 1004 - DNA, 21 bp, Homo sapiens
gtcttgagacgccacccaggc

SEQ ID NO: 1005 - DNA, 18 bp, Homo sapiens
gtgacttgcccacgggtc

SEQ ID NO: 1006 - DNA, 19 bp, Homo sapiens
gtgcggattcgccacccag

SEQ ID NO: 1007 - DNA, 22 bp, Homo sapiens
gtggccacactccattggagca

SEQ ID NO: 1008 - DNA, 19 bp, Homo sapiens
gttattagttggcgctcga

SEQ ID NO: 1009 - DNA, 20 bp, Homo sapiens
gttcacgcgtcagctttcag

SEQ ID NO: 1010 - DNA, 21 bp, Homo sapiens
gttcacgcgtcagctttcagt

SEQ ID NO: 1011 - DNA, 22 bp, Homo sapiens
gttgtagtggttgcgtaaattt

SEQ ID NO: 1012 - DNA, 18 bp, Homo sapiens
gttgtttgaagtttttgt

SEQ ID NO: 1013 - DNA, 18 bp, Homo sapiens
gtttccggtagcctcatg

SEQ ID NO: 1014 - DNA, 18 bp, Homo sapiens
gtttgaaacgccacccag

SEQ ID NO: 1015 - DNA, 21 bp, Homo sapiens
taacaccagcctcgtactagc

SEQ ID NO: 1016 - DNA, 19 bp, Homo sapiens
taaccccggcctcgtacta

SEQ ID NO: 1017 - DNA, 18 bp, Homo sapiens
taccattatccctcatta

SEQ ID NO: 1018 - DNA, 17 bp, Homo sapiens
tacccacatgctaaaga

SEQ ID NO: 1019 - DNA, 20 bp, Homo sapiens
tacgggtgactgtgccatgc

SEQ ID NO: 1020 - DNA, 22 bp, Homo sapiens
tacgtacgttgaaggaaaccag

SEQ ID NO: 1021 - DNA, 24 bp, Homo sapiens
tacgtacgttgaaggaaaccagcc

SEQ ID NO: 1022 - DNA, 17 bp, Homo sapiens
tactccagcctgaggtt

SEQ ID NO: 1023 - DNA, 19 bp, Homo sapiens
tagcatcaacctggccatc

SEQ ID NO: 1024 - DNA, 17 bp, Homo sapiens
taggcctggacccctcg

SEQ ID NO: 1025 - DNA, 17 bp, Homo sapiens
tatatccccggatacat

SEQ ID NO: 1026 - DNA, 19 bp, Homo sapiens
tatgctggcgcttaaactc

SEQ ID NO: 1027 - DNA, 18 bp, Homo sapiens
tattggtccatagataaa

SEQ ID NO: 1028 - DNA, 22 bp, Homo sapiens
tcacacccagcctcgtactagc

SEQ ID NO: 1029 - DNA, 17 bp, Homo sapiens
tcaggcgactcaagccc

SEQ ID NO: 1030 - DNA, 18 bp, Homo sapiens
tccagaggcggtaaaact

SEQ ID NO: 1031 - DNA, 18 bp, Homo sapiens
tcccaggggcgaacgtag

SEQ ID NO: 1032 - DNA, 24 bp, Homo sapiens
tccgtggagtacatgatgatgttg

SEQ ID NO: 1033 - DNA, 17 bp, Homo sapiens
tcgaacttcttccccat

SEQ ID NO: 1034 - DNA, 17 bp, Homo sapiens
tcgccccacttgattgt

SEQ ID NO: 1035 - DNA, 28 bp, Homo sapiens
tcggccgattaacaccggcctcgtacct

SEQ ID NO: 1036 - DNA, 20 bp, Homo sapiens
tcggccgattaacacgcggc

SEQ ID NO: 1037 - DNA, 19 bp, Homo sapiens
tcgtacctagccgtatgtt

SEQ ID NO: 1038 - DNA, 18 bp, Homo sapiens
tcgtccgattcacccccg

SEQ ID NO: 1039 - DNA, 19 bp, Homo sapiens
tcgtctctctctctcctct

SEQ ID NO: 1040 - DNA, 17 bp, Homo sapiens
tcgtgcagggttattcc

SEQ ID NO: 1041 - DNA, 17 bp, Homo sapiens
tcgtggccccgctgcca

SEQ ID NO: 1042 - DNA, 18 bp, Homo sapiens
tcttcaatgagcctccag

SEQ ID NO: 1043 - DNA, 17 bp, Homo sapiens
tctttttttgaagggaa

SEQ ID NO: 1044 - DNA, 17 bp, Homo sapiens
tgaacataatagctatt

SEQ ID NO: 1045 - DNA, 17 bp, Homo sapiens
tgcacagcatggccatg

SEQ ID NO: 1046 - DNA, 17 bp, Homo sapiens
tgcgagccgccaggttg

SEQ ID NO: 1047 - DNA, 20 bp, Homo sapiens
tgcgtgcccgcacgctaaac

SEQ ID NO: 1048 - DNA, 20 bp, Homo sapiens
tggaaggcgggaaattgccc

SEQ ID NO: 1049 - DNA, 26 bp, Homo sapiens
tggaaggcgggaaattgcccatgata

SEQ ID NO: 1050 - DNA, 20 bp, Homo sapiens
tggattcagcacaagcattt

SEQ ID NO: 1051 - DNA, 17 bp, Homo sapiens
tggctcgcagaccctcg

SEQ ID NO: 1052 - DNA, 52 bp, Homo sapiens
tgggtcctcacacgctcgccgcagggccgcgatctcagcttgcaaggcgcgc

SEQ ID NO: 1053 - DNA, 18 bp, Homo sapiens
tggtcattatctcgagag

SEQ ID NO: 1054 - DNA, 20 bp, Homo sapiens
tggtcgcgatatccggagaa

SEQ ID NO: 1055 - DNA, 19 bp, Homo sapiens
tggtgcaaacacttcggcc

SEQ ID NO: 1056 - DNA, 17 bp, Homo sapiens
tggtgtctcttgtgtgt

SEQ ID NO: 1057 - DNA, 17 bp, Homo sapiens
tggttcactgtataagt

SEQ ID NO: 1058 - DNA, 17 bp, Homo sapiens
tggttcttaacgaggtg

SEQ ID NO: 1059 - DNA, 25 bp, Homo sapiens
tgtaacaggagattaacagagggtg

SEQ ID NO: 1060 - DNA, 17 bp, Homo sapiens
tgtatgaacatgaggct

SEQ ID NO: 1061 - DNA, 17 bp, Homo sapiens
tgtcgacagacgagcgc

SEQ ID NO: 1062 - DNA, 19 bp, Homo sapiens
tgtttgttgtttgtggtgt

SEQ ID NO: 1063 - DNA, 27 bp, Homo sapiens
ttaacaccaggcctcgtacctagccta

SEQ ID NO: 1064 - DNA, 17 bp, Homo sapiens
ttagttcgagttgtcca

SEQ ID NO: 1065 - DNA, 17 bp, Homo sapiens
ttatccaggggtagcca

SEQ ID NO: 1066 - DNA, 17 bp, Homo sapiens
ttcaaacccagcctcga

SEQ ID NO: 1067 - DNA, 17 bp, Homo sapiens
ttcatttttatgaatgg

SEQ ID NO: 1068 - DNA, 17 bp, Homo sapiens
ttcccagcttcggttgc

SEQ ID NO: 1069 - DNA, 17 bp, Homo sapiens
ttcccggttcaggctca

SEQ ID NO: 1070 - DNA, 17 bp, Homo sapiens
ttcgaaccatgctcatg

SEQ ID NO: 1071 - DNA, 17 bp, Homo sapiens
ttctctgggaagtccct

SEQ ID NO: 1072 - DNA, 17 bp, Homo sapiens
ttgaaccctaggcatgt

SEQ ID NO: 1073 - DNA, 17 bp, Homo sapiens
ttgaagcgatgaggccc

SEQ ID NO: 1074 - DNA, 17 bp, Homo sapiens
ttgccgtggtcaccccg

SEQ ID NO: 1075 - DNA, 18 bp, Homo sapiens
ttgtagtacacagttgat

SEQ ID NO: 1076 - DNA, 18 bp, Homo sapiens
tttcatcaaaccttccga

SEQ ID NO: 1077 - DNA, 17 bp, Homo sapiens
tttggtccaggactgcc

SEQ ID NO: 1078 - DNA, 17 bp, Homo sapiens
ttttccccccttgtgta

SEQ ID NO: 1079 - DNA, 18 bp, Homo sapiens
ttttgaactactatcccc

SEQ ID NO: 1080 - DNA, 17 bp, Homo sapiens
ttttggtgctttttgtt

SEQ ID NO: 1081 - DNA, 17 bp, Homo sapiens
aaaaacgccacccaggc

SEQ ID NO: 1082 - DNA, 17 bp, Homo sapiens
aaaacatttccctttcc

SEQ ID NO: 1083 - DNA, 21 bp, Homo sapiens
aaacccagcctcgcacctagc

SEQ ID NO: 1084 - DNA, 27 bp, Homo sapiens
aaacccagcctcgtacctagcctaatt

SEQ ID NO: 1085 - DNA, 18 bp, Homo sapiens
aaactgaaatctctgcca

SEQ ID NO: 1086 - DNA, 17 bp, Homo sapiens
aaagaagggtggggcgg

SEQ ID NO: 1087 - DNA, 19 bp, Homo sapiens
aaatagtttgttgttgatt

SEQ ID NO: 1088 - DNA, 18 bp, Homo sapiens
aaatgcatcaaagttgct

SEQ ID NO: 1089 - DNA, 24 bp, Homo sapiens
aaatgcttacttaatagtattatt

SEQ ID NO: 1090 - DNA, 21 bp, Homo sapiens
aaatgtatcaaacgaacataa

SEQ ID NO: 1091 - DNA, 26 bp, Homo sapiens
aacacccaggcctcgtacctagcctt

SEQ ID NO: 1092 - DNA, 17 bp, Homo sapiens
aacacggggtcgcggtc

SEQ ID NO: 1093 - DNA, 17 bp, Homo sapiens
aacaggggggccacccc

SEQ ID NO: 1094 - DNA, 17 bp, Homo sapiens
aaccactttgctctgcc

SEQ ID NO: 1095 - DNA, 23 bp, Homo sapiens
aaccaggcctcgtacctagccta

SEQ ID NO: 1096 - DNA, 17 bp, Homo sapiens
aacccagcccgtaccta

SEQ ID NO: 1097 - DNA, 24 bp, Homo sapiens
aacccagcctcgtacctagccgaa

SEQ ID NO: 1098 - DNA, 18 bp, Homo sapiens
aaccctatgtgtacccac

SEQ ID NO: 1099 - DNA, 17 bp, Homo sapiens
aactctgtgtggtctga

SEQ ID NO: 1100 - DNA, 20 bp, Homo sapiens
aacttagttcgagttgtcca

SEQ ID NO: 1101 - DNA, 18 bp, Homo sapiens
aacttgtgtccagcgacc

SEQ ID NO: 1102 - DNA, 18 bp, Homo sapiens
aagagatatgtccgccaa

SEQ ID NO: 1103 - DNA, 18 bp, Homo sapiens
aagcaggcgtcaggaggg

SEQ ID NO: 1104 - DNA, 17 bp, Homo sapiens
aagcgggggatgggggg

SEQ ID NO: 1105 - DNA, 17 bp, Homo sapiens
aagcttccatgtgcatt

SEQ ID NO: 1106 - DNA, 17 bp, Homo sapiens
aaggaaattgtatattc

SEQ ID NO: 1107 - DNA, 17 bp, Homo sapiens
aaggtggtcagtggaac

SEQ ID NO: 1108 - DNA, 18 bp, Homo sapiens
aaggttagttttcgtgga

SEQ ID NO: 1109 - DNA, 17 bp, Homo sapiens
aagtagagacccttccc

SEQ ID NO: 1110 - DNA, 17 bp, Homo sapiens
aagtgcctgcgaattcc

SEQ ID NO: 1111 - DNA, 17 bp, Homo sapiens
aataggatgccttggag

SEQ ID NO: 1112 - DNA, 26 bp, Homo sapiens
aatatttgaacataatagctattctg

SEQ ID NO: 1113 - DNA, 34 bp, Homo sapiens
aatatttgaacataatagctattctgttgactat

SEQ ID NO: 1114 - DNA, 18 bp, Homo sapiens
aatcctccaactgtgtgg

SEQ ID NO: 1115 - DNA, 18 bp, Homo sapiens
aatttattaaagtcttag

SEQ ID NO: 1116 - DNA, 17 bp, Homo sapiens
acaacccaggcctcgta

SEQ ID NO: 1117 - DNA, 17 bp, Homo sapiens
acacaaacttacagagt

SEQ ID NO: 1118 - DNA, 19 bp, Homo sapiens
acacaatctgctaatagcc

SEQ ID NO: 1119 - DNA, 26 bp, Homo sapiens
acacacccagcctcgtacctagccta

SEQ ID NO: 1120 - DNA, 22 bp, Homo sapiens
acaccagcctcgtacctagccg

SEQ ID NO: 1121 - DNA, 17 bp, Homo sapiens
acaccagctctactagc

SEQ ID NO: 1122 - DNA, 19 bp, Homo sapiens
acaccaggctcgtactagc

SEQ ID NO: 1123 - DNA, 28 bp, Homo sapiens
acacccagcctcgtacctagccgtaagt

SEQ ID NO: 1124 - DNA, 21 bp, Homo sapiens
acacccaggcctcgcacctag

SEQ ID NO: 1125 - DNA, 21 bp, Homo sapiens
acacccgcctcgcacctagcc

SEQ ID NO: 1126 - DNA, 18 bp, Homo sapiens
acacccggcctcgcacct

SEQ ID NO: 1127 - DNA, 19 bp, Homo sapiens
acacccggcctcgcaccta

SEQ ID NO: 1128 - DNA, 22 bp, Homo sapiens
acacccggcctcgctacctagc

SEQ ID NO: 1129 - DNA, 21 bp, Homo sapiens
acacggcgagataccgtctct

SEQ ID NO: 1130 - DNA, 17 bp, Homo sapiens
acaggacaccctccggg

SEQ ID NO: 1131 - DNA, 17 bp, Homo sapiens
acaggtctgtgtctcaa

SEQ ID NO: 1132 - DNA, 18 bp, Homo sapiens
acatacatagcccctcgt

SEQ ID NO: 1133 - DNA, 25 bp, Homo sapiens
acatccacactgggtcggctggccg

SEQ ID NO: 1134 - DNA, 17 bp, Homo sapiens
acatgaaattgatcttt

SEQ ID NO: 1135 - DNA, 17 bp, Homo sapiens
accacaaaagggtactt

SEQ ID NO: 1136 - DNA, 17 bp, Homo sapiens
accaccagtctgagctt

SEQ ID NO: 1137 - DNA, 19 bp, Homo sapiens
accaccataacgttaggct

SEQ ID NO: 1138 - DNA, 26 bp, Homo sapiens
accacccagcctcgtacctagcctta

SEQ ID NO: 1139 - DNA, 19 bp, Homo sapiens
accacccgcctcgtactag

SEQ ID NO: 1140 - DNA, 25 bp, Homo sapiens
accacccggcctcgtacctagccta

SEQ ID NO: 1141 - DNA, 18 bp, Homo sapiens
accaccggcctcgtacta

SEQ ID NO: 1142 - DNA, 17 bp, Homo sapiens
acccagcctcgcactag

SEQ ID NO: 1143 - DNA, 20 bp, Homo sapiens
acccagcctcgtacctaccg

SEQ ID NO: 1144 - DNA, 21 bp, Homo sapiens
acccagcctcgtacctagact

SEQ ID NO: 1145 - DNA, 27 bp, Homo sapiens
acccagcctcgtacctagccgtagttt

SEQ ID NO: 1146 - DNA, 26 bp, Homo sapiens
acccagcctcgtacctagcctaattt

SEQ ID NO: 1147 - DNA, 21 bp, Homo sapiens
acccagcctcgtactagcctt

SEQ ID NO: 1148 - DNA, 17 bp, Homo sapiens
acccagctcgacctagc

SEQ ID NO: 1149 - DNA, 18 bp, Homo sapiens
acccaggctctacctagc

SEQ ID NO: 1150 - DNA, 17 bp, Homo sapiens
accccatgttgcagatt

SEQ ID NO: 1151 - DNA, 21 bp, Homo sapiens
acccgcctcgtacctagccta

SEQ ID NO: 1152 - DNA, 17 bp, Homo sapiens
acccgcctctactagcc

SEQ ID NO: 1153 - DNA, 18 bp, Homo sapiens
acccggcctcgacctagc

SEQ ID NO: 1154 - DNA, 18 bp, Homo sapiens
accctagagggtctcggg

SEQ ID NO: 1155 - DNA, 30 bp, Homo sapiens
accgtccctcgggcgctccgtgacacgaag

SEQ ID NO: 1156 - DNA, 17 bp, Homo sapiens
acctcggccgattaccc

SEQ ID NO: 1157 - DNA, 18 bp, Homo sapiens
acctggctgtaatgttcc

SEQ ID NO: 1158 - DNA, 23 bp, Homo sapiens
acgcaggcctcgtacctagccta

SEQ ID NO: 1159 - DNA, 17 bp, Homo sapiens
acgcggcctctacctag

SEQ ID NO: 1160 - DNA, 22 bp, Homo sapiens
acgcgtgggcgatcgcgtgggt

SEQ ID NO: 1161 - DNA, 17 bp, Homo sapiens
acgcgtggtcgaccatt

SEQ ID NO: 1162 - DNA, 17 bp, Homo sapiens
acggagagttgaccctg

SEQ ID NO: 1163 - DNA, 18 bp, Homo sapiens
acggggtatgctccaata

SEQ ID NO: 1164 - DNA, 17 bp, Homo sapiens
actagtatatcgcgtca

SEQ ID NO: 1165 - DNA, 17 bp, Homo sapiens
actgaagatactacttt

SEQ ID NO: 1166 - DNA, 17 bp, Homo sapiens
actgagaaccctgtgct

SEQ ID NO: 1167 - DNA, 18 bp, Homo sapiens
actgccacaccctgggca

SEQ ID NO: 1168 - DNA, 17 bp, Homo sapiens
actgcttgcattttgct

SEQ ID NO: 1169 - DNA, 22 bp, Homo sapiens
acttaactccagtaatagggtc

SEQ ID NO: 1170 - DNA, 22 bp, Homo sapiens
acttgttgagcttctctaggcc

SEQ ID NO: 1171 - DNA, 18 bp, Homo sapiens
agacaacttgtgatgtca

SEQ ID NO: 1172 - DNA, 18 bp, Homo sapiens
agacagccttgggtcctg

SEQ ID NO: 1173 - DNA, 18 bp, Homo sapiens
agacggggagcatcacag

SEQ ID NO: 1174 - DNA, 17 bp, Homo sapiens
agagatcaaatgtatgt

SEQ ID NO: 1175 - DNA, 18 bp, Homo sapiens
agagcacccagaggaaga

SEQ ID NO: 1176 - DNA, 21 bp, Homo sapiens
agaggtttcggatcattccga

SEQ ID NO: 1177 - DNA, 27 bp, Homo sapiens
agaggtttcggatcattccgaagggca

SEQ ID NO: 1178 - DNA, 20 bp, Homo sapiens
agcacaccaacacctctgcg

SEQ ID NO: 1179 - DNA, 17 bp, Homo sapiens
agcacctttcggtcaca

SEQ ID NO: 1180 - DNA, 17 bp, Homo sapiens
agcactccagtcccaga

SEQ ID NO: 1181 - DNA, 17 bp, Homo sapiens
agcccacactttagaaa

SEQ ID NO: 1182 - DNA, 18 bp, Homo sapiens
agcccaccagccaccatg

SEQ ID NO: 1183 - DNA, 19 bp, Homo sapiens
agcctcagaattctttcca

SEQ ID NO: 1184 - DNA, 18 bp, Homo sapiens
agcctcgctacctagccc

SEQ ID NO: 1185 - DNA, 22 bp, Homo sapiens
agcctcgtacctagccgtaatt

SEQ ID NO: 1186 - DNA, 17 bp, Homo sapiens
agcctcgtacctagcga

SEQ ID NO: 1187 - DNA, 22 bp, Homo sapiens
agcgcagctcagttgtagaagg

SEQ ID NO: 1188 - DNA, 18 bp, Homo sapiens
agctaatgggatgcagag

SEQ ID NO: 1189 - DNA, 17 bp, Homo sapiens
agctatgcttgtgaaaa

SEQ ID NO: 1190 - DNA, 26 bp, Homo sapiens
aggacttgtctctgaacacctcgagc

SEQ ID NO: 1191 - DNA, 17 bp, Homo sapiens
aggagacaggtgaggag

SEQ ID NO: 1192 - DNA, 17 bp, Homo sapiens
aggagacgttggacttc

SEQ ID NO: 1193 - DNA, 20 bp, Homo sapiens
aggatccagtagcagctggg

SEQ ID NO: 1194 - DNA, 19 bp, Homo sapiens
aggcaccagttgtctgaat

SEQ ID NO: 1195 - DNA, 19 bp, Homo sapiens
aggcctggacatcggcctt

SEQ ID NO: 1196 - DNA, 19 bp, Homo sapiens
agggctactgaagcctgtg

SEQ ID NO: 1197 - DNA, 17 bp, Homo sapiens
agggggaagggggtaat

SEQ ID NO: 1198 - DNA, 17 bp, Homo sapiens
agggtggcatttagggc

SEQ ID NO: 1199 - DNA, 18 bp, Homo sapiens
aggtgggcgtgctcagct

SEQ ID NO: 1200 - DNA, 17 bp, Homo sapiens
aggtgtatcattagagg

SEQ ID NO: 1201 - DNA, 19 bp, Homo sapiens
agtcaccccaccgctatgg

SEQ ID NO: 1202 - DNA, 21 bp, Homo sapiens
agtccgatcaatgatccgcct

SEQ ID NO: 1203 - DNA, 23 bp, Homo sapiens
agtccgatcaatgatccgcctac

SEQ ID NO: 1204 - DNA, 17 bp, Homo sapiens
agtcgggtcaagtactt

SEQ ID NO: 1205 - DNA, 17 bp, Homo sapiens
agtctcggccggctcgc

SEQ ID NO: 1206 - DNA, 17 bp, Homo sapiens
agtggcactgcgggaaa

SEQ ID NO: 1207 - DNA, 18 bp, Homo sapiens
agttcttcccggatccaa

SEQ ID NO: 1208 - DNA, 19 bp, Homo sapiens
ataaatatcgtttcacata

SEQ ID NO: 1209 - DNA, 20 bp, Homo sapiens
ataatgagtgcacacacctg

SEQ ID NO: 1210 - DNA, 19 bp, Homo sapiens
atacgaccccagacttagg

SEQ ID NO: 1211 - DNA, 17 bp, Homo sapiens
atagcgcctttgtcttc

SEQ ID NO: 1212 - DNA, 20 bp, Homo sapiens
atagctattctgttgactat

SEQ ID NO: 1213 - DNA, 17 bp, Homo sapiens
atagggaaactggtgaa

SEQ ID NO: 1214 - DNA, 17 bp, Homo sapiens
atattggccagagggaa

SEQ ID NO: 1215 - DNA, 17 bp, Homo sapiens
atcaacacccagcctcg

SEQ ID NO: 1216 - DNA, 17 bp, Homo sapiens
atcacgccatcctcgtg

SEQ ID NO: 1217 - DNA, 18 bp, Homo sapiens
atcacttcaatgcccaga

SEQ ID NO: 1218 - DNA, 17 bp, Homo sapiens
atcacttgtagatgaac

SEQ ID NO: 1219 - DNA, 17 bp, Homo sapiens
atcggggacagtgagcg

SEQ ID NO: 1220 - DNA, 17 bp, Homo sapiens
atctctcagaatttttg

SEQ ID NO: 1221 - DNA, 17 bp, Homo sapiens
atcttgcgcaagttgct

SEQ ID NO: 1222 - DNA, 17 bp, Homo sapiens
atgagaccacttgcgcc

SEQ ID NO: 1223 - DNA, 18 bp, Homo sapiens
atgcccataccaccaaga

SEQ ID NO: 1224 - DNA, 17 bp, Homo sapiens
atgccccccacccctat

SEQ ID NO: 1225 - DNA, 21 bp, Homo sapiens
atgcgcggctatacggagccg

SEQ ID NO: 1226 - DNA, 28 bp, Homo sapiens
atgcgcggctatacggagccggaggccc

SEQ ID NO: 1227 - DNA, 32 bp, Homo sapiens
atgcgcggctatacggagccggaggcccggag

SEQ ID NO: 1228 - DNA, 17 bp, Homo sapiens
atgcggacaccttccag

SEQ ID NO: 1229 - DNA, 20 bp, Homo sapiens
atggaattttaggcaaggaa

SEQ ID NO: 1230 - DNA, 17 bp, Homo sapiens
atggattgtaggcctca

SEQ ID NO: 1231 - DNA, 18 bp, Homo sapiens
atgggaattagccgagct

SEQ ID NO: 1232 - DNA, 17 bp, Homo sapiens
atgtccacggaattcgg

SEQ ID NO: 1233 - DNA, 19 bp, Homo sapiens
attaacaccggcctcgacc

SEQ ID NO: 1234 - DNA, 17 bp, Homo sapiens
attaagttcaatgactg

SEQ ID NO: 1235 - DNA, 17 bp, Homo sapiens
attagtcatgtttctca

SEQ ID NO: 1236 - DNA, 23 bp, Homo sapiens
attatgccattgtagaccttccg

SEQ ID NO: 1237 - DNA, 17 bp, Homo sapiens
attcatgccaaagttca

SEQ ID NO: 1238 - DNA, 21 bp, Homo sapiens
attctttggtccaggactgcc

SEQ ID NO: 1239 - DNA, 17 bp, Homo sapiens
atttaatccgaactttc

SEQ ID NO: 1240 - DNA, 17 bp, Homo sapiens
caaaacactattttaat

SEQ ID NO: 1241 - DNA, 25 bp, Homo sapiens
caacaccagcctcgtacctagccta

SEQ ID NO: 1242 - DNA, 20 bp, Homo sapiens
caacaccagctaccactgag

SEQ ID NO: 1243 - DNA, 27 bp, Homo sapiens
caacacccagcctcgtacctagcccta

SEQ ID NO: 1244 - DNA, 27 bp, Homo sapiens
caacacccagcctcgtacctagcctta

SEQ ID NO: 1245 - DNA, 22 bp, Homo sapiens
caacacccggcctcgctaccta

SEQ ID NO: 1246 - DNA, 18 bp, Homo sapiens
caagaaggttatgtatgc

SEQ ID NO: 1247 - DNA, 17 bp, Homo sapiens
cacacacaacatcacac

SEQ ID NO: 1248 - DNA, 20 bp, Homo sapiens
cacacacctgcaccctgaca

SEQ ID NO: 1249 - DNA, 27 bp, Homo sapiens
caccacccagcctcgtacctagcctat

SEQ ID NO: 1250 - DNA, 26 bp, Homo sapiens
caccacccagcctcgtacctagcctt

SEQ ID NO: 1251 - DNA, 17 bp, Homo sapiens
caccactatgatggtga

SEQ ID NO: 1252 - DNA, 18 bp, Homo sapiens
caccactgggcccagggc

SEQ ID NO: 1253 - DNA, 18 bp, Homo sapiens
caccagcctcgactagcc

SEQ ID NO: 1254 - DNA, 17 bp, Homo sapiens
caccagcctcgcaccta

SEQ ID NO: 1255 - DNA, 18 bp, Homo sapiens
caccattccgaccagata

SEQ ID NO: 1256 - DNA, 24 bp, Homo sapiens
cacccagcctcgtacctagccgaa

SEQ ID NO: 1257 - DNA, 26 bp, Homo sapiens
cacccagcctcgtacctagccgtagt

SEQ ID NO: 1258 - DNA, 35 bp, Homo sapiens
caccccggcgctgtccactgcatctgacagagcgc

SEQ ID NO: 1259 - DNA, 19 bp, Homo sapiens
cacccgcctcgcacctagc

SEQ ID NO: 1260 - DNA, 20 bp, Homo sapiens
cacccgcctcgcacctagcc

SEQ ID NO: 1261 - DNA, 18 bp, Homo sapiens
cacccggcccgtacctag

SEQ ID NO: 1262 - DNA, 19 bp, Homo sapiens
cacccggcccgtacctagc

SEQ ID NO: 1263 - DNA, 20 bp, Homo sapiens
caccctcaggtagaccccag

SEQ ID NO: 1264 - DNA, 17 bp, Homo sapiens
cacgaattggacctcat

SEQ ID NO: 1265 - DNA, 24 bp, Homo sapiens
cacgatgggcacgatgccattctg

SEQ ID NO: 1266 - DNA, 19 bp, Homo sapiens
cactgccacaccctgggca

SEQ ID NO: 1267 - DNA, 23 bp, Homo sapiens
cactggggttggtccttgctcct

SEQ ID NO: 1268 - DNA, 17 bp, Homo sapiens
cagaaggatcactttaa

SEQ ID NO: 1269 - DNA, 22 bp, Homo sapiens
cagacacggcaacatgcggaca

SEQ ID NO: 1270 - DNA, 18 bp, Homo sapiens
cagaccaatacagtacta

SEQ ID NO: 1271 - DNA, 21 bp, Homo sapiens
cagactcgtagcactttcttc

SEQ ID NO: 1272 - DNA, 17 bp, Homo sapiens
cagccatcgtacctagc

SEQ ID NO: 1273 - DNA, 19 bp, Homo sapiens
cagcccgccagcgggcgcc

SEQ ID NO: 1274 - DNA, 20 bp, Homo sapiens
cagcctcgcacctagccgta

SEQ ID NO: 1275 - DNA, 19 bp, Homo sapiens
cagcctcgctacctagccc

SEQ ID NO: 1276 - DNA, 17 bp, Homo sapiens
cagcctcgtactagcca

SEQ ID NO: 1277 - DNA, 17 bp, Homo sapiens
cagctcaaggcttgtca

SEQ ID NO: 1278 - DNA, 26 bp, Homo sapiens
cagctctcggtgccggctgtggagag

SEQ ID NO: 1279 - DNA, 17 bp, Homo sapiens
cagctgcagggtggcgc

SEQ ID NO: 1280 - DNA, 17 bp, Homo sapiens
cagctttctgctgcatc

SEQ ID NO: 1281 - DNA, 19 bp, Homo sapiens
caggaaggcgcccactccg

SEQ ID NO: 1282 - DNA, 17 bp, Homo sapiens
caggctcaaggacaagc

SEQ ID NO: 1283 - DNA, 18 bp, Homo sapiens
cagggaccagttcccaat

SEQ ID NO: 1284 - DNA, 17 bp, Homo sapiens
cagggtgagccgaaggg

SEQ ID NO: 1285 - DNA, 17 bp, Homo sapiens
caggttaaccctggctt

SEQ ID NO: 1286 - DNA, 17 bp, Homo sapiens
cagtcacccccaagaaa

SEQ ID NO: 1287 - DNA, 23 bp, Homo sapiens
cagtcatcgatacaccatcatga

SEQ ID NO: 1288 - DNA, 17 bp, Homo sapiens
cagtccaccacggacac

SEQ ID NO: 1289 - DNA, 17 bp, Homo sapiens
cagtccagagcgtcaac

SEQ ID NO: 1290 - DNA, 17 bp, Homo sapiens
cagtcgcggtgcccgtg

SEQ ID NO: 1291 - DNA, 17 bp, Homo sapiens
cagtgaaatcctcgagc

SEQ ID NO: 1292 - DNA, 17 bp, Homo sapiens
cataccctcactcacac

SEQ ID NO: 1293 - DNA, 20 bp, Homo sapiens
catagagatagtctcgaatt

SEQ ID NO: 1294 - DNA, 17 bp, Homo sapiens
catccccacatggtgca

SEQ ID NO: 1295 - DNA, 19 bp, Homo sapiens
catccttggaaccaaggca

SEQ ID NO: 1296 - DNA, 22 bp, Homo sapiens
catggtggattgatgctttttt

SEQ ID NO: 1297 - DNA, 17 bp, Homo sapiens
cattcagggcgtccatc

SEQ ID NO: 1298 - DNA, 17 bp, Homo sapiens
cattcccaaccaccaaa

SEQ ID NO: 1299 - DNA, 18 bp, Homo sapiens
cattcggatgctgctaag

SEQ ID NO: 1300 - DNA, 17 bp, Homo sapiens
cattgtttggggatcca

SEQ ID NO: 1301 - DNA, 19 bp, Homo sapiens
ccaacgactgggacccttg

SEQ ID NO: 1302 - DNA, 23 bp, Homo sapiens
ccaagcagctttccccttagctc

SEQ ID NO: 1303 - DNA, 18 bp, Homo sapiens
ccaaggcttgtcaattga

SEQ ID NO: 1304 - DNA, 17 bp, Homo sapiens
ccaaggtggactctctc

SEQ ID NO: 1305 - DNA, 17 bp, Homo sapiens
ccaagtggagatgccag

SEQ ID NO: 1306 - DNA, 17 bp, Homo sapiens
ccacaaatctcaggaac

SEQ ID NO: 1307 - DNA, 17 bp, Homo sapiens
ccacccagccctcgtac

SEQ ID NO: 1308 - DNA, 17 bp, Homo sapiens
ccacccagcctcgacct

SEQ ID NO: 1309 - DNA, 19 bp, Homo sapiens
ccaccgagcctcgtaccta

SEQ ID NO: 1310 - DNA, 18 bp, Homo sapiens
ccacctttgtcaagctca

SEQ ID NO: 1311 - DNA, 18 bp, Homo sapiens
ccactggaacccagtggc

SEQ ID NO: 1312 - DNA, 17 bp, Homo sapiens
ccagaagccacacacgc

SEQ ID NO: 1313 - DNA, 17 bp, Homo sapiens
ccagagacccgttatgc

SEQ ID NO: 1314 - DNA, 17 bp, Homo sapiens
ccagatccgttgactcc

SEQ ID NO: 1315 - DNA, 17 bp, Homo sapiens
ccagcctgcacgtcctg

SEQ ID NO: 1316 - DNA, 17 bp, Homo sapiens
ccagcctgtacctagcc

SEQ ID NO: 1317 - DNA, 17 bp, Homo sapiens
ccaggccacacgtccac

SEQ ID NO: 1318 - DNA, 18 bp, Homo sapiens
ccaggccacacgtccaca

SEQ ID NO: 1319 - DNA, 17 bp, Homo sapiens
ccaggcccaggggaggt

SEQ ID NO: 1320 - DNA, 19 bp, Homo sapiens
ccaggcctcgtacctagac

SEQ ID NO: 1321 - DNA, 22 bp, Homo sapiens
ccaggcctcgtacctagccgaa

SEQ ID NO: 1322 - DNA, 22 bp, Homo sapiens
ccaggcctcgtacctagcctag

SEQ ID NO: 1323 - DNA, 17 bp, Homo sapiens
ccaggctcgtacttagg

SEQ ID NO: 1324 - DNA, 17 bp, Homo sapiens
ccaggctctacctagcc

SEQ ID NO: 1325 - DNA, 17 bp, Homo sapiens
ccaggtagatggggtgg

SEQ ID NO: 1326 - DNA, 18 bp, Homo sapiens
ccatagctacttctggaa

SEQ ID NO: 1327 - DNA, 17 bp, Homo sapiens
ccatatttgctccttga

SEQ ID NO: 1328 - DNA, 19 bp, Homo sapiens
ccatcaccgccgtcctcca

SEQ ID NO: 1329 - DNA, 18 bp, Homo sapiens
ccatgcctcgtacctagc

SEQ ID NO: 1330 - DNA, 17 bp, Homo sapiens
ccatttatggctgttat

SEQ ID NO: 1331 - DNA, 23 bp, Homo sapiens
cccacccagcctcgtacctagcc

SEQ ID NO: 1332 - DNA, 24 bp, Homo sapiens
cccacgcaggggtaacaagatacg

SEQ ID NO: 1333 - DNA, 22 bp, Homo sapiens
cccagcctcgcacctagccgta

SEQ ID NO: 1334 - DNA, 19 bp, Homo sapiens
cccagtagtattttgtctg

SEQ ID NO: 1335 - DNA, 19 bp, Homo sapiens
cccattgttttgtggtaaa

SEQ ID NO: 1336 - DNA, 19 bp, Homo sapiens
ccccaaccggttgagaccc

SEQ ID NO: 1337 - DNA, 17 bp, Homo sapiens
ccccaccacctcggggg

SEQ ID NO: 1338 - DNA, 25 bp, Homo sapiens
ccccacgcaggggtaacaagatacg

SEQ ID NO: 1339 - DNA, 17 bp, Homo sapiens
ccccagaaccgctgttg

SEQ ID NO: 1340 - DNA, 17 bp, Homo sapiens
ccccatcatgtcggagt

SEQ ID NO: 1341 - DNA, 17 bp, Homo sapiens
ccccattgtgtaacatc

SEQ ID NO: 1342 - DNA, 17 bp, Homo sapiens
ccccccaggagcaagtt

SEQ ID NO: 1343 - DNA, 17 bp, Homo sapiens
cccccccctcttttatg

SEQ ID NO: 1344 - DNA, 18 bp, Homo sapiens
ccccccgccccgctcccc

SEQ ID NO: 1345 - DNA, 17 bp, Homo sapiens
ccccccgcctctgtctc

SEQ ID NO: 1346 - DNA, 17 bp, Homo sapiens
ccccctccacgggcccc

SEQ ID NO: 1347 - DNA, 18 bp, Homo sapiens
ccccctccccccctgttt

SEQ ID NO: 1348 - DNA, 20 bp, Homo sapiens
ccccgcctcgtactagccta

SEQ ID NO: 1349 - DNA, 18 bp, Homo sapiens
ccccgggacccttttccc

SEQ ID NO: 1350 - DNA, 17 bp, Homo sapiens
ccccggtatttaccccc

SEQ ID NO: 1351 - DNA, 25 bp, Homo sapiens
ccctcgggcgctccgtgacacgaag

SEQ ID NO: 1352 - DNA, 17 bp, Homo sapiens
ccctgccggaactctgt

SEQ ID NO: 1353 - DNA, 17 bp, Homo sapiens
cccttaccggctgtcat

SEQ ID NO: 1354 - DNA, 17 bp, Homo sapiens
cccttgaggtaggtcag

SEQ ID NO: 1355 - DNA, 17 bp, Homo sapiens
cccttgcccctgccctt

SEQ ID NO: 1356 - DNA, 17 bp, Homo sapiens
cccttgctcaccccgat

SEQ ID NO: 1357 - DNA, 18 bp, Homo sapiens
ccgaccagagattggcac

SEQ ID NO: 1358 - DNA, 17 bp, Homo sapiens
ccgattaacaccagctc

SEQ ID NO: 1359 - DNA, 18 bp, Homo sapiens
ccgattaacacgcggcct

SEQ ID NO: 1360 - DNA, 17 bp, Homo sapiens
ccgattcacacgcggcc

SEQ ID NO: 1361 - DNA, 18 bp, Homo sapiens
ccgattcacccccggcct

SEQ ID NO: 1362 - DNA, 26 bp, Homo sapiens
ccgcagagccgttgctcaccggccgg

SEQ ID NO: 1363 - DNA, 18 bp, Homo sapiens
ccgccgcgggtcgccgcc

SEQ ID NO: 1364 - DNA, 17 bp, Homo sapiens
ccggggggccaaaaccg

SEQ ID NO: 1365 - DNA, 19 bp, Homo sapiens
ccggtggatgatgacctcc

SEQ ID NO: 1366 - DNA, 22 bp, Homo sapiens
ccgtatcgtacacccgaagtag

SEQ ID NO: 1367 - DNA, 17 bp, Homo sapiens
ccgtccctggataaagg

SEQ ID NO: 1368 - DNA, 18 bp, Homo sapiens
ccgtctgagtcatcatat

SEQ ID NO: 1369 - DNA, 20 bp, Homo sapiens
cctcgccgattcacacccag

SEQ ID NO: 1370 - DNA, 18 bp, Homo sapiens
cctcggccaattaacacc

SEQ ID NO: 1371 - DNA, 19 bp, Homo sapiens
cctcggccgaattaaccac

SEQ ID NO: 1372 - DNA, 19 bp, Homo sapiens
cctcggccgattaaccacg

SEQ ID NO: 1373 - DNA, 35 bp, Homo sapiens
cctcggccgattacacacccagcctcgtacctagc

SEQ ID NO: 1374 - DNA, 22 bp, Homo sapiens
cctcggccgattaccacccggc

SEQ ID NO: 1375 - DNA, 24 bp, Homo sapiens
cctcggccgattacccccagcctc

SEQ ID NO: 1376 - DNA, 19 bp, Homo sapiens
cctcggccgattaccccgg

SEQ ID NO: 1377 - DNA, 18 bp, Homo sapiens
cctcggccgattagacac

SEQ ID NO: 1378 - DNA, 19 bp, Homo sapiens
cctcggccgattagacacc

SEQ ID NO: 1379 - DNA, 19 bp, Homo sapiens
cctcggccgattcgacacc

SEQ ID NO: 1380 - DNA, 18 bp, Homo sapiens
cctcggtgccgattaacc

SEQ ID NO: 1381 - DNA, 21 bp, Homo sapiens
cctcgtacctagcctatagtt

SEQ ID NO: 1382 - DNA, 18 bp, Homo sapiens
cctcgtccgattacacac

SEQ ID NO: 1383 - DNA, 18 bp, Homo sapiens
cctcgtccgattacaccc

SEQ ID NO: 1384 - DNA, 19 bp, Homo sapiens
cctcgtccgattaccaccc

SEQ ID NO: 1385 - DNA, 20 bp, Homo sapiens
cctcgtccgattacccccgg

SEQ ID NO: 1386 - DNA, 19 bp, Homo sapiens
cctcgtccgattaccccgg

SEQ ID NO: 1387 - DNA, 19 bp, Homo sapiens
cctcgtctgaatcgccacc

SEQ ID NO: 1388 - DNA, 22 bp, Homo sapiens
cctcgtgccgatcgccacccag

SEQ ID NO: 1389 - DNA, 17 bp, Homo sapiens
cctcgtgccgatttaaa

SEQ ID NO: 1390 - DNA, 23 bp, Homo sapiens
cctcgtgctgagaagccacccag

SEQ ID NO: 1391 - DNA, 17 bp, Homo sapiens
cctctaatgatacacct

SEQ ID NO: 1392 - DNA, 17 bp, Homo sapiens
cctctctcaacggatga

SEQ ID NO: 1393 - DNA, 17 bp, Homo sapiens
cctgaagatttgggggg

SEQ ID NO: 1394 - DNA, 17 bp, Homo sapiens
cctgcacggaactctgt

SEQ ID NO: 1395 - DNA, 17 bp, Homo sapiens
cctgctcacggggctac

SEQ ID NO: 1396 - DNA, 19 bp, Homo sapiens
cctggtggcttcagtgtag

SEQ ID NO: 1397 - DNA, 17 bp, Homo sapiens
cctgtaagtcccaggct

SEQ ID NO: 1398 - DNA, 18 bp, Homo sapiens
ccttaaagatgatctagc

SEQ ID NO: 1399 - DNA, 17 bp, Homo sapiens
ccttacatgggctttgc

SEQ ID NO: 1400 - DNA, 17 bp, Homo sapiens
ccttgtcactccttctc

SEQ ID NO: 1401 - DNA, 17 bp, Homo sapiens
cgaattaacaccagcct

SEQ ID NO: 1402 - DNA, 21 bp, Homo sapiens
cgacgcgtggtccgacgcgtg

SEQ ID NO: 1403 - DNA, 17 bp, Homo sapiens
cgactgggttcacctcc

SEQ ID NO: 1404 - DNA, 18 bp, Homo sapiens
cgagaatagttctctctc

SEQ ID NO: 1405 - DNA, 21 bp, Homo sapiens
cgagaatcagagttcctctgt

SEQ ID NO: 1406 - DNA, 18 bp, Homo sapiens
cgagacgctgctccgacg

SEQ ID NO: 1407 - DNA, 17 bp, Homo sapiens
cgaggacgccacccagg

SEQ ID NO: 1408 - DNA, 23 bp, Homo sapiens
cgaggtggatcgcggtcgtcatg

SEQ ID NO: 1409 - DNA, 17 bp, Homo sapiens
cgattaacaccaggctc

SEQ ID NO: 1410 - DNA, 22 bp, Homo sapiens
cgcagcctcgtacctagccgta

SEQ ID NO: 1411 - DNA, 20 bp, Homo sapiens
cgcaggacctctgctcaggg

SEQ ID NO: 1412 - DNA, 25 bp, Homo sapiens
cgcaggacctctgctcagggaacta

SEQ ID NO: 1413 - DNA, 18 bp, Homo sapiens
cgccgcgtagctgacccc

SEQ ID NO: 1414 - DNA, 17 bp, Homo sapiens
cgcctcccgggacaccg

SEQ ID NO: 1415 - DNA, 19 bp, Homo sapiens
cgcctcttggctgatcagg

SEQ ID NO: 1416 - DNA, 17 bp, Homo sapiens
cgccttccacccccccc

SEQ ID NO: 1417 - DNA, 48 bp, Homo sapiens
cgcgaggccggaccgaagaggaagggttcgtggagcatggggtgcgca

SEQ ID NO: 1418 - DNA, 17 bp, Homo sapiens
cgcgtggtcgacgcgtg

SEQ ID NO: 1419 - DNA, 18 bp, Homo sapiens
cggaaaagccacccaggc

SEQ ID NO: 1420 - DNA, 18 bp, Homo sapiens
cggaaccaagatatcata

SEQ ID NO: 1421 - DNA, 17 bp, Homo sapiens
cggacgcggggtgacga

SEQ ID NO: 1422 - DNA, 17 bp, Homo sapiens
cggacgcgtggtcccga

SEQ ID NO: 1423 - DNA, 17 bp, Homo sapiens
cggagccacgtgaaagt

SEQ ID NO: 1424 - DNA, 17 bp, Homo sapiens
cggaggtttccatgggc

SEQ ID NO: 1425 - DNA, 17 bp, Homo sapiens
cggccgattaacccggc

SEQ ID NO: 1426 - DNA, 18 bp, Homo sapiens
cggccgattaccacccgg

SEQ ID NO: 1427 - DNA, 17 bp, Homo sapiens
cggccgatttacccccg

SEQ ID NO: 1428 - DNA, 17 bp, Homo sapiens
cggcttggggtgccgcc

SEQ ID NO: 1429 - DNA, 17 bp, Homo sapiens
cgggttgtttgttgtgt

SEQ ID NO: 1430 - DNA, 18 bp, Homo sapiens
cgtaatcgccacccaggc

SEQ ID NO: 1431 - DNA, 28 bp, Homo sapiens
cgtagacgccttcgatattgcttcttcg

SEQ ID NO: 1432 - DNA, 17 bp, Homo sapiens
cgtccgcgggctggaag

SEQ ID NO: 1433 - DNA, 17 bp, Homo sapiens
cgtgtgtgtggggcggg

SEQ ID NO: 1434 - DNA, 17 bp, Homo sapiens
cgttaagttagtttagt

SEQ ID NO: 1435 - DNA, 24 bp, Homo sapiens
cgttctttatcttgcctatttcct

SEQ ID NO: 1436 - DNA, 17 bp, Homo sapiens
cgtttctttttcttgtt

SEQ ID NO: 1437 - DNA, 20 bp, Homo sapiens
cgtttggaaacgccacccag

SEQ ID NO: 1438 - DNA, 17 bp, Homo sapiens
ctacattaaccagagta

SEQ ID NO: 1439 - DNA, 17 bp, Homo sapiens
ctaggacccacgcgtcc

SEQ ID NO: 1440 - DNA, 25 bp, Homo sapiens
ctatgagtcaaggagtgtaaccttc

SEQ ID NO: 1441 - DNA, 17 bp, Homo sapiens
ctcaggggctgttctgt

SEQ ID NO: 1442 - DNA, 17 bp, Homo sapiens
ctcagttgttcagatga

SEQ ID NO: 1443 - DNA, 17 bp, Homo sapiens
ctcatggtctgcatccc

SEQ ID NO: 1444 - DNA, 17 bp, Homo sapiens
ctcatggtgacatgctg

SEQ ID NO: 1445 - DNA, 17 bp, Homo sapiens
ctccacaaatctcagga

SEQ ID NO: 1446 - DNA, 17 bp, Homo sapiens
ctcccccaagttgggca

SEQ ID NO: 1447 - DNA, 27 bp, Homo sapiens
ctccggaatgtcataggggtgtgactg

SEQ ID NO: 1448 - DNA, 17 bp, Homo sapiens
ctcctgggcaacccccg

SEQ ID NO: 1449 - DNA, 18 bp, Homo sapiens
ctccttgccaggcaaagg

SEQ ID NO: 1450 - DNA, 18 bp, Homo sapiens
ctcgaagcgcgcgcgtgc

SEQ ID NO: 1451 - DNA, 17 bp, Homo sapiens
ctcgctacctagcctta

SEQ ID NO: 1452 - DNA, 23 bp, Homo sapiens
ctcgcttgtgcatcttgttgtag

SEQ ID NO: 1453 - DNA, 17 bp, Homo sapiens
ctcggccgataacaccc

SEQ ID NO: 1454 - DNA, 19 bp, Homo sapiens
ctcggccgattaaaaccag

SEQ ID NO: 1455 - DNA, 18 bp, Homo sapiens
ctcggccgattaaaaccc

SEQ ID NO: 1456 - DNA, 25 bp, Homo sapiens
ctcggccgattaacaccgagcctcg

SEQ ID NO: 1457 - DNA, 18 bp, Homo sapiens
ctcggccgattaaccacg

SEQ ID NO: 1458 - DNA, 33 bp, Homo sapiens
ctcggccgattcacaccagcctcgtacctagcc

SEQ ID NO: 1459 - DNA, 20 bp, Homo sapiens
ctcggccgatttacacccag

SEQ ID NO: 1460 - DNA, 17 bp, Homo sapiens
ctcgtacctagccctaa

SEQ ID NO: 1461 - DNA, 18 bp, Homo sapiens
ctcgtactagcctagttt

SEQ ID NO: 1462 - DNA, 17 bp, Homo sapiens
ctcgtcataattggccc

SEQ ID NO: 1463 - DNA, 19 bp, Homo sapiens
ctcgtgctgaatcgccacc

SEQ ID NO: 1464 - DNA, 22 bp, Homo sapiens
ctcgtgtgtattcgccacccag

SEQ ID NO: 1465 - DNA, 20 bp, Homo sapiens
ctctgccatggttgggatca

SEQ ID NO: 1466 - DNA, 17 bp, Homo sapiens
ctctgtgctccgggcgg

SEQ ID NO: 1467 - DNA, 17 bp, Homo sapiens
ctcttagaattttattg

SEQ ID NO: 1468 - DNA, 20 bp, Homo sapiens
ctcttcagatctcgtagaag

SEQ ID NO: 1469 - DNA, 17 bp, Homo sapiens
ctcttctggaagtccct

SEQ ID NO: 1470 - DNA, 17 bp, Homo sapiens
ctctttcaatagtcata

SEQ ID NO: 1471 - DNA, 17 bp, Homo sapiens
ctgaagaaggtgcttga

SEQ ID NO: 1472 - DNA, 17 bp, Homo sapiens
ctgatggagaggaaagg

SEQ ID NO: 1473 - DNA, 17 bp, Homo sapiens
ctgcacggaactctgtt

SEQ ID NO: 1474 - DNA, 18 bp, Homo sapiens
ctgctttgtcgccgctgg

SEQ ID NO: 1475 - DNA, 18 bp, Homo sapiens
ctggcagcaacctgtcga

SEQ ID NO: 1476 - DNA, 24 bp, Homo sapiens
ctggcagcaacctgtcgaaaatac

SEQ ID NO: 1477 - DNA, 32 bp, Homo sapiens
ctgggacccgccctcgctggccccctaggggc

SEQ ID NO: 1478 - DNA, 24 bp, Homo sapiens
ctgggaccttcgccggcaggaaat

SEQ ID NO: 1479 - DNA, 18 bp, Homo sapiens
ctggtacacctcaagccc

SEQ ID NO: 1480 - DNA, 18 bp, Homo sapiens
ctgtagtcttagaaggca

SEQ ID NO: 1481 - DNA, 17 bp, Homo sapiens
ctgtgacgcatgtgtgt

SEQ ID NO: 1482 - DNA, 17 bp, Homo sapiens
ctgttgggtgcatctgg

SEQ ID NO: 1483 - DNA, 17 bp, Homo sapiens
ctgtttgttgtggttgc

SEQ ID NO: 1484 - DNA, 21 bp, Homo sapiens
cttaactccagtaatagggtc

SEQ ID NO: 1485 - DNA, 18 bp, Homo sapiens
cttcagatctcgtagaag

SEQ ID NO: 1486 - DNA, 17 bp, Homo sapiens
cttcagccagcccagcg

SEQ ID NO: 1487 - DNA, 20 bp, Homo sapiens
cttccagctttgttaccaga

SEQ ID NO: 1488 - DNA, 17 bp, Homo sapiens
cttccagctttttcccc

SEQ ID NO: 1489 - DNA, 18 bp, Homo sapiens
cttcctcggccgattaac

SEQ ID NO: 1490 - DNA, 17 bp, Homo sapiens
cttcgttatcaatccag

SEQ ID NO: 1491 - DNA, 17 bp, Homo sapiens
cttctaggcacagtgcg

SEQ ID NO: 1492 - DNA, 21 bp, Homo sapiens
cttgcgccaacagggcatctc

SEQ ID NO: 1493 - DNA, 17 bp, Homo sapiens
cttggacaatttcctca

SEQ ID NO: 1494 - DNA, 18 bp, Homo sapiens
cttggacaggaaggagcc

SEQ ID NO: 1495 - DNA, 19 bp, Homo sapiens
cttggctgatcaggcctga

SEQ ID NO: 1496 - DNA, 17 bp, Homo sapiens
ctttgaggaggtccagg

SEQ ID NO: 1497 - DNA, 17 bp, Homo sapiens
ctttttcttgtgtctct

SEQ ID NO: 1498 - DNA, 20 bp, Homo sapiens
cttttttaactatccttacc

SEQ ID NO: 1499 - DNA, 18 bp, Homo sapiens
gaaaggtgtgagcacggc

SEQ ID NO: 1500 - DNA, 17 bp, Homo sapiens
gaacgggcgggaggggg

SEQ ID NO: 1501 - DNA, 18 bp, Homo sapiens
gaactctgtgtggtctga

SEQ ID NO: 1502 - DNA, 29 bp, Homo sapiens
gaagatcagtagcctcagcggtgcccacc

SEQ ID NO: 1503 - DNA, 17 bp, Homo sapiens
gaatacagctggaagcc

SEQ ID NO: 1504 - DNA, 20 bp, Homo sapiens
gaatattcatcaaatatact

SEQ ID NO: 1505 - DNA, 17 bp, Homo sapiens
gaatcaggtcctggtaa

SEQ ID NO: 1506 - DNA, 22 bp, Homo sapiens
gacaacctctgcttctctgttt

SEQ ID NO: 1507 - DNA, 20 bp, Homo sapiens
gacagacacattcttcgaca

SEQ ID NO: 1508 - DNA, 17 bp, Homo sapiens
gacatagaagcctggag

SEQ ID NO: 1509 - DNA, 18 bp, Homo sapiens
gacatagaagcctggagt

SEQ ID NO: 1510 - DNA, 17 bp, Homo sapiens
gacatagagtttgaagt

SEQ ID NO: 1511 - DNA, 18 bp, Homo sapiens
gacatgcccggaactggg

SEQ ID NO: 1512 - DNA, 17 bp, Homo sapiens
gaccacatatgccgggg

SEQ ID NO: 1513 - DNA, 19 bp, Homo sapiens
gaccaccggccccggatgc

SEQ ID NO: 1514 - DNA, 49 bp, Homo sapiens
gacccagctcgggggctcggagctgtgctccgcgaagccacggctgggc

SEQ ID NO: 1515 - DNA, 17 bp, Homo sapiens
gaccctctcttccgtgg

SEQ ID NO: 1516 - DNA, 23 bp, Homo sapiens
gacgcgtggtcgcgacgcgtggg

SEQ ID NO: 1517 - DNA, 17 bp, Homo sapiens
gagccccccatgatccc

SEQ ID NO: 1518 - DNA, 18 bp, Homo sapiens
gagcgcgaggcggaggcg

SEQ ID NO: 1519 - DNA, 21 bp, Homo sapiens
gagcttctcccatcaacatct

SEQ ID NO: 1520 - DNA, 17 bp, Homo sapiens
gaggatatctgacagag

SEQ ID NO: 1521 - DNA, 17 bp, Homo sapiens
gagggaagcgtcttccc

SEQ ID NO: 1522 - DNA, 17 bp, Homo sapiens
gagggccggctgcaaag

SEQ ID NO: 1523 - DNA, 18 bp, Homo sapiens
gagtcgggtcagttacct

SEQ ID NO: 1524 - DNA, 17 bp, Homo sapiens
gagttgaaaggtgttct

SEQ ID NO: 1525 - DNA, 19 bp, Homo sapiens
gatagggtaccagctcctc

SEQ ID NO: 1526 - DNA, 18 bp, Homo sapiens
gatagttctggagagccc

SEQ ID NO: 1527 - DNA, 17 bp, Homo sapiens
gatcatctgcacaaggc

SEQ ID NO: 1528 - DNA, 19 bp, Homo sapiens
gatccagagtgcccgctgg

SEQ ID NO: 1529 - DNA, 26 bp, Homo sapiens
gatccagctagggcgatatgtcatct

SEQ ID NO: 1530 - DNA, 18 bp, Homo sapiens
gatccccttctggtaaaa

SEQ ID NO: 1531 - DNA, 17 bp, Homo sapiens
gatcgcatctccaggtc

SEQ ID NO: 1532 - DNA, 18 bp, Homo sapiens
gatggatgtagaagctcc

SEQ ID NO: 1533 - DNA, 23 bp, Homo sapiens
gatggggcgcccaccctcgaagg

SEQ ID NO: 1534 - DNA, 21 bp, Homo sapiens
gatgtcccgcgtgcttgaaag

SEQ ID NO: 1535 - DNA, 17 bp, Homo sapiens
gatgtttgggctgtgtc

SEQ ID NO: 1536 - DNA, 17 bp, Homo sapiens
gattaaccccggcctct

SEQ ID NO: 1537 - DNA, 17 bp, Homo sapiens
gcaaggtgtcctgactc

SEQ ID NO: 1538 - DNA, 17 bp, Homo sapiens
gcacagacatgaggcac

SEQ ID NO: 1539 - DNA, 18 bp, Homo sapiens
gcacggatggcagcaaag

SEQ ID NO: 1540 - DNA, 17 bp, Homo sapiens
gcacttcagatgccact

SEQ ID NO: 1541 - DNA, 25 bp, Homo sapiens
gcagagtgagacccattcttagaag

SEQ ID NO: 1542 - DNA, 17 bp, Homo sapiens
gcagcacgcacagcgca

SEQ ID NO: 1543 - DNA, 18 bp, Homo sapiens
gcagtcccagaccttcaa

SEQ ID NO: 1544 - DNA, 20 bp, Homo sapiens
gcagtctgtgcctcggagag

SEQ ID NO: 1545 - DNA, 19 bp, Homo sapiens
gcatcaaagtgcctgcgaa

SEQ ID NO: 1546 - DNA, 17 bp, Homo sapiens
gccaaccgtgcagcggc

SEQ ID NO: 1547 - DNA, 17 bp, Homo sapiens
gccaagcagggcggacg

SEQ ID NO: 1548 - DNA, 49 bp, Homo sapiens
gcccagccgtggcttcgcggagcacagctccgagcccccgagctgggtc

SEQ ID NO: 1549 - DNA, 17 bp, Homo sapiens
gccctcgtacctagcct

SEQ ID NO: 1550 - DNA, 17 bp, Homo sapiens
gccgattaacccaggcc

SEQ ID NO: 1551 - DNA, 19 bp, Homo sapiens
gccgattaacccaggcctc

SEQ ID NO: 1552 - DNA, 17 bp, Homo sapiens
gccgattacacacccgg

SEQ ID NO: 1553 - DNA, 18 bp, Homo sapiens
gccgattcaccacccggc

SEQ ID NO: 1554 - DNA, 25 bp, Homo sapiens
gccgtcctccaactggatcccaggt

SEQ ID NO: 1555 - DNA, 19 bp, Homo sapiens
gcctcggccgatcaccacc

SEQ ID NO: 1556 - DNA, 21 bp, Homo sapiens
gcctcgtacctagccttaatt

SEQ ID NO: 1557 - DNA, 17 bp, Homo sapiens
gccttcaacacaagaca

SEQ ID NO: 1558 - DNA, 19 bp, Homo sapiens
gccttccaatgacttggag

SEQ ID NO: 1559 - DNA, 24 bp, Homo sapiens
gcgagcccgagctcccgctccgaa

SEQ ID NO: 1560 - DNA, 20 bp, Homo sapiens
gcgatacgaccccagactta

SEQ ID NO: 1561 - DNA, 27 bp, Homo sapiens
gcgccacccagcctcgtacctagccta

SEQ ID NO: 1562 - DNA, 18 bp, Homo sapiens
gcgcgctctctctgtgtg

SEQ ID NO: 1563 - DNA, 18 bp, Homo sapiens
gcgctcgttcccccaccc

SEQ ID NO: 1564 - DNA, 24 bp, Homo sapiens
gcggagaagcgcagaacgacaaat

SEQ ID NO: 1565 - DNA, 19 bp, Homo sapiens
gcggagccccgaagtagta

SEQ ID NO: 1566 - DNA, 17 bp, Homo sapiens
gcggcacttggcccaag

SEQ ID NO: 1567 - DNA, 17 bp, Homo sapiens
gcggcctcggccgattc

SEQ ID NO: 1568 - DNA, 17 bp, Homo sapiens
gcgggcgcgcatagcac

SEQ ID NO: 1569 - DNA, 17 bp, Homo sapiens
gcgtccactcctctcgt

SEQ ID NO: 1570 - DNA, 17 bp, Homo sapiens
gcgttcttctgcgggaa

SEQ ID NO: 1571 - DNA, 17 bp, Homo sapiens
gctaaaaagccgttaag

SEQ ID NO: 1572 - DNA, 27 bp, Homo sapiens
gctaggatgcgcggctatacggagccg

SEQ ID NO: 1573 - DNA, 34 bp, Homo sapiens
gctaggatgcgcggctatacggagccggaggccc

SEQ ID NO: 1574 - DNA, 41 bp, Homo sapiens
gctaggatgcgcggctatacggagccggaggcccggagaga

SEQ ID NO: 1575 - DNA, 19 bp, Homo sapiens
gctcagcctctttccctat

SEQ ID NO: 1576 - DNA, 17 bp, Homo sapiens
gctcctgcgcttcatgt

SEQ ID NO: 1577 - DNA, 17 bp, Homo sapiens
gctctgatattgagtgc

SEQ ID NO: 1578 - DNA, 17 bp, Homo sapiens
gctggagcctgttccat

SEQ ID NO: 1579 - DNA, 17 bp, Homo sapiens
gctgggtggttcagtgt

SEQ ID NO: 1580 - DNA, 17 bp, Homo sapiens
gcttccagcttcgtcgt

SEQ ID NO: 1581 - DNA, 21 bp, Homo sapiens
gcttgcgcttaactcagcaat

SEQ ID NO: 1582 - DNA, 17 bp, Homo sapiens
gcttggcaccttgttgc

SEQ ID NO: 1583 - DNA, 17 bp, Homo sapiens
ggaaagcccctcccccc

SEQ ID NO: 1584 - DNA, 20 bp, Homo sapiens
ggaaagcggttttacgccaa

SEQ ID NO: 1585 - DNA, 18 bp, Homo sapiens
ggaaagggcccattgccc

SEQ ID NO: 1586 - DNA, 17 bp, Homo sapiens
ggaattggcacagatgc

SEQ ID NO: 1587 - DNA, 17 bp, Homo sapiens
ggacctctcttccgtgg

SEQ ID NO: 1588 - DNA, 17 bp, Homo sapiens
ggagaacctccagcttg

SEQ ID NO: 1589 - DNA, 18 bp, Homo sapiens
ggagaatttcggggtgaa

SEQ ID NO: 1590 - DNA, 17 bp, Homo sapiens
ggagccagtcctgcgcc

SEQ ID NO: 1591 - DNA, 18 bp, Homo sapiens
ggataccccccagggtca

SEQ ID NO: 1592 - DNA, 28 bp, Homo sapiens
ggatggtgagggacgagcgctcgatgaa

SEQ ID NO: 1593 - DNA, 22 bp, Homo sapiens
ggattaatcctcttaaagtgcc

SEQ ID NO: 1594 - DNA, 18 bp, Homo sapiens
ggattgaagttatcactg

SEQ ID NO: 1595 - DNA, 18 bp, Homo sapiens
ggcacagggtcatgcttc

SEQ ID NO: 1596 - DNA, 18 bp, Homo sapiens
ggcaccaacattggtgac

SEQ ID NO: 1597 - DNA, 19 bp, Homo sapiens
ggcacgcatggggtcactg

SEQ ID NO: 1598 - DNA, 17 bp, Homo sapiens
ggcactgctgttacatg

SEQ ID NO: 1599 - DNA, 17 bp, Homo sapiens
ggcaggcagggctctac

SEQ ID NO: 1600 - DNA, 17 bp, Homo sapiens
ggccctcggggttattt

SEQ ID NO: 1601 - DNA, 25 bp, Homo sapiens
ggccgaagcgagcgggctcgggatc

SEQ ID NO: 1602 - DNA, 18 bp, Homo sapiens
ggccgattacacacccgg

SEQ ID NO: 1603 - DNA, 22 bp, Homo sapiens
ggccgattcacaccaggcctcg

SEQ ID NO: 1604 - DNA, 32 bp, Homo sapiens
ggccggccagagcgcgcttccttagtaggtgg

SEQ ID NO: 1605 - DNA, 17 bp, Homo sapiens
ggcctcgtactatgcct

SEQ ID NO: 1606 - DNA, 18 bp, Homo sapiens
ggcctcgtacttagccta

SEQ ID NO: 1607 - DNA, 18 bp, Homo sapiens
ggcgctggagacagtgaa

SEQ ID NO: 1608 - DNA, 19 bp, Homo sapiens
ggcggccagcgccgcgtac

SEQ ID NO: 1609 - DNA, 17 bp, Homo sapiens
ggctcgtactagccgta

SEQ ID NO: 1610 - DNA, 17 bp, Homo sapiens
ggctgctttctcctcct

SEQ ID NO: 1611 - DNA, 17 bp, Homo sapiens
ggctggcccgggatgga

SEQ ID NO: 1612 - DNA, 18 bp, Homo sapiens
ggcttccgcgggaggttt

SEQ ID NO: 1613 - DNA, 18 bp, Homo sapiens
gggaatggtccacgcatg

SEQ ID NO: 1614 - DNA, 17 bp, Homo sapiens
gggaggagtaatggagg

SEQ ID NO: 1615 - DNA, 17 bp, Homo sapiens
gggctcagtaactgtag

SEQ ID NO: 1616 - DNA, 18 bp, Homo sapiens
gggctgctgttctatagg

SEQ ID NO: 1617 - DNA, 18 bp, Homo sapiens
gggctgggcattgccctc

SEQ ID NO: 1618 - DNA, 17 bp, Homo sapiens
ggggaaagagcgcgggg

SEQ ID NO: 1619 - DNA, 17 bp, Homo sapiens
ggggagggtatgtcccc

SEQ ID NO: 1620 - DNA, 18 bp, Homo sapiens
ggggcacaccaggcacac

SEQ ID NO: 1621 - DNA, 17 bp, Homo sapiens
ggggcagggctcagccg

SEQ ID NO: 1622 - DNA, 17 bp, Homo sapiens
ggggccaatttcattac

SEQ ID NO: 1623 - DNA, 17 bp, Homo sapiens
gggggtttggagaaacc

SEQ ID NO: 1624 - DNA, 17 bp, Homo sapiens
gggtcaggtctccaaca

SEQ ID NO: 1625 - DNA, 18 bp, Homo sapiens
gggtccttttagttggtc

SEQ ID NO: 1626 - DNA, 17 bp, Homo sapiens
gggtggtcccagggggt

SEQ ID NO: 1627 - DNA, 17 bp, Homo sapiens
gggttcagggaaaccca

SEQ ID NO: 1628 - DNA, 18 bp, Homo sapiens
gggttcagggaaacccag

SEQ ID NO: 1629 - DNA, 18 bp, Homo sapiens
gggttggtccttgctcct

SEQ ID NO: 1630 - DNA, 18 bp, Homo sapiens
gggtttgagacccccagt

SEQ ID NO: 1631 - DNA, 17 bp, Homo sapiens
ggtaacctgagaccagg

SEQ ID NO: 1632 - DNA, 19 bp, Homo sapiens
ggtaccccggccagccttc

SEQ ID NO: 1633 - DNA, 18 bp, Homo sapiens
ggtactcagaaaggtcct

SEQ ID NO: 1634 - DNA, 17 bp, Homo sapiens
ggtccggcccacatcct

SEQ ID NO: 1635 - DNA, 18 bp, Homo sapiens
ggtcgacgattcgaagga

SEQ ID NO: 1636 - DNA, 17 bp, Homo sapiens
ggtcgccgattctgaaa

SEQ ID NO: 1637 - DNA, 17 bp, Homo sapiens
ggtgaatggaactgctc

SEQ ID NO: 1638 - DNA, 17 bp, Homo sapiens
ggtgattctgagtgtca

SEQ ID NO: 1639 - DNA, 19 bp, Homo sapiens
ggtggattgatgctttttt

SEQ ID NO: 1640 - DNA, 17 bp, Homo sapiens
ggtgggccgctgagagc

SEQ ID NO: 1641 - DNA, 17 bp, Homo sapiens
ggtggtagctgcaccag

SEQ ID NO: 1642 - DNA, 17 bp, Homo sapiens
ggtgttgtgtgctggtg

SEQ ID NO: 1643 - DNA, 17 bp, Homo sapiens
ggttcccgggactgcag

SEQ ID NO: 1644 - DNA, 21 bp, Homo sapiens
ggttctcgctctcccaggcct

SEQ ID NO: 1645 - DNA, 18 bp, Homo sapiens
gtaaaggccttcgttcgt

SEQ ID NO: 1646 - DNA, 18 bp, Homo sapiens
gtaacacccaggcctcgt

SEQ ID NO: 1647 - DNA, 22 bp, Homo sapiens
gtaatgataagcacgccggcca

SEQ ID NO: 1648 - DNA, 17 bp, Homo sapiens
gtaccgaaggcagcgtt

SEQ ID NO: 1649 - DNA, 17 bp, Homo sapiens
gtacctagcctaagtgt

SEQ ID NO: 1650 - DNA, 17 bp, Homo sapiens
gtatagccagcatgagc

SEQ ID NO: 1651 - DNA, 17 bp, Homo sapiens
gtatccactttaggaca

SEQ ID NO: 1652 - DNA, 21 bp, Homo sapiens
gtcagctccttgcgcccggac

SEQ ID NO: 1653 - DNA, 17 bp, Homo sapiens
gtcatctcttcaaaaga

SEQ ID NO: 1654 - DNA, 17 bp, Homo sapiens
gtccatgggacacagcc

SEQ ID NO: 1655 - DNA, 17 bp, Homo sapiens
gtcccgcacggttgagg

SEQ ID NO: 1656 - DNA, 20 bp, Homo sapiens
gtcgacgattccgaagaatt

SEQ ID NO: 1657 - DNA, 17 bp, Homo sapiens
gtcgcggggcctggtac

SEQ ID NO: 1658 - DNA, 18 bp, Homo sapiens
gtcgtagagagccttcgt

SEQ ID NO: 1659 - DNA, 17 bp, Homo sapiens
gtcgtgttgtgctgcgc

SEQ ID NO: 1660 - DNA, 17 bp, Homo sapiens
gtctggggaatacctct

SEQ ID NO: 1661 - DNA, 17 bp, Homo sapiens
gtcttgtgttgatgtgt

SEQ ID NO: 1662 - DNA, 17 bp, Homo sapiens
gtgcacccgaggccttg

SEQ ID NO: 1663 - DNA, 17 bp, Homo sapiens
gtgcggtggtgggtgtg

SEQ ID NO: 1664 - DNA, 17 bp, Homo sapiens
gtggattcccgcaagat

SEQ ID NO: 1665 - DNA, 17 bp, Homo sapiens
gtggcggcgccgacccg

SEQ ID NO: 1666 - DNA, 18 bp, Homo sapiens
gtggctcagctaagtgct

SEQ ID NO: 1667 - DNA, 17 bp, Homo sapiens
gtgggctttatacattc

SEQ ID NO: 1668 - DNA, 17 bp, Homo sapiens
gtggtaggtccggtggg

SEQ ID NO: 1669 - DNA, 17 bp, Homo sapiens
gtgtccatactgttcaa

SEQ ID NO: 1670 - DNA, 17 bp, Homo sapiens
gtgtccatcccttgaac

SEQ ID NO: 1671 - DNA, 17 bp, Homo sapiens
gtgtcccttttagttgg

SEQ ID NO: 1672 - DNA, 17 bp, Homo sapiens
gtgtggcagtggctgcg

SEQ ID NO: 1673 - DNA, 17 bp, Homo sapiens
gtgttcacgccaggggg

SEQ ID NO: 1674 - DNA, 18 bp, Homo sapiens
gtgttggaaacgccaccc

SEQ ID NO: 1675 - DNA, 17 bp, Homo sapiens
gtgttgttggtcgtggt

SEQ ID NO: 1676 - DNA, 19 bp, Homo sapiens
gttcagctccagccgactg

SEQ ID NO: 1677 - DNA, 20 bp, Homo sapiens
gttctcccttggagaggcac

SEQ ID NO: 1678 - DNA, 20 bp, Homo sapiens
gttctccgaccagctcgtca

SEQ ID NO: 1679 - DNA, 28 bp, Homo sapiens
gttgtagtagtcctcctctcgaaacatc

SEQ ID NO: 1680 - DNA, 17 bp, Homo sapiens
gttgtgtgtcgtgtttg

SEQ ID NO: 1681 - DNA, 17 bp, Homo sapiens
gtttctcacaactctag

SEQ ID NO: 1682 - DNA, 19 bp, Homo sapiens
gtttgaaaacgccacccag

SEQ ID NO: 1683 - DNA, 18 bp, Homo sapiens
taaaaccctatgtgtaac

SEQ ID NO: 1684 - DNA, 19 bp, Homo sapiens
taacaccaggcctcgacct

SEQ ID NO: 1685 - DNA, 22 bp, Homo sapiens
taacaccaggcctcgacctagc

SEQ ID NO: 1686 - DNA, 27 bp, Homo sapiens
taacacccagcctcgtacctagccgta

SEQ ID NO: 1687 - DNA, 23 bp, Homo sapiens
taacaccgagcctcgtacctagc

SEQ ID NO: 1688 - DNA, 20 bp, Homo sapiens
taacaccggcctcgtactag

SEQ ID NO: 1689 - DNA, 18 bp, Homo sapiens
taacccagcctcgtacct

SEQ ID NO: 1690 - DNA, 26 bp, Homo sapiens
tacacacccagcctcgtacctagccg

SEQ ID NO: 1691 - DNA, 17 bp, Homo sapiens
tacagcccagagtgatt

SEQ ID NO: 1692 - DNA, 17 bp, Homo sapiens
taccatgtttccagggg

SEQ ID NO: 1693 - DNA, 17 bp, Homo sapiens
tacctagccgtattgtt

SEQ ID NO: 1694 - DNA, 33 bp, Homo sapiens
tactttcaccccggcgctgtccactgcatctga

SEQ ID NO: 1695 - DNA, 17 bp, Homo sapiens
tagcggtgtaaagtgtt

SEQ ID NO: 1696 - DNA, 18 bp, Homo sapiens
taggctgaacacaggcgt

SEQ ID NO: 1697 - DNA, 19 bp, Homo sapiens
tagggcatagctctgactc

SEQ ID NO: 1698 - DNA, 19 bp, Homo sapiens
tagggtctgatcatatcat

SEQ ID NO: 1699 - DNA, 19 bp, Homo sapiens
tagtgctccagcacgggtt

SEQ ID NO: 1700 - DNA, 17 bp, Homo sapiens
tagtgtgttgatgtcaa

SEQ ID NO: 1701 - DNA, 19 bp, Homo sapiens
tagtttacttcttgagggg

SEQ ID NO: 1702 - DNA, 19 bp, Homo sapiens
tagtttgtttggtcagctt

SEQ ID NO: 1703 - DNA, 17 bp, Homo sapiens
tatggcattagtgagtt

SEQ ID NO: 1704 - DNA, 18 bp, Homo sapiens
tattaaagtcttagagac

SEQ ID NO: 1705 - DNA, 18 bp, Homo sapiens
tcaacccaggcctcgtac

SEQ ID NO: 1706 - DNA, 19 bp, Homo sapiens
tcaacccaggcctcgtacc

SEQ ID NO: 1707 - DNA, 19 bp, Homo sapiens
tcaatgatggaagttgaag

SEQ ID NO: 1708 - DNA, 17 bp, Homo sapiens
tcagatcccctaggttg

SEQ ID NO: 1709 - DNA, 17 bp, Homo sapiens
tcagatgctgtttgcac

SEQ ID NO: 1710 - DNA, 17 bp, Homo sapiens
tcagccaggggcgacgt

SEQ ID NO: 1711 - DNA, 26 bp, Homo sapiens
tcatccagtactacatcttgatgtat

SEQ ID NO: 1712 - DNA, 17 bp, Homo sapiens
tcatttttgtcatgcca

SEQ ID NO: 1713 - DNA, 17 bp, Homo sapiens
tcccagccatcaggagc

SEQ ID NO: 1714 - DNA, 20 bp, Homo sapiens
tccgccacccggacatagga

SEQ ID NO: 1715 - DNA, 18 bp, Homo sapiens
tccgccccccggacatta

SEQ ID NO: 1716 - DNA, 27 bp, Homo sapiens
tccgcggagccgctgccatccgcccag

SEQ ID NO: 1717 - DNA, 18 bp, Homo sapiens
tcctcgtccgattaaccc

SEQ ID NO: 1718 - DNA, 24 bp, Homo sapiens
tcgacacccagcctcgtacctagc

SEQ ID NO: 1719 - DNA, 19 bp, Homo sapiens
tcgacgattcgcaagaatt

SEQ ID NO: 1720 - DNA, 17 bp, Homo sapiens
tcgctacctagcctaag

SEQ ID NO: 1721 - DNA, 18 bp, Homo sapiens
tcggccgattaaccgcgg

SEQ ID NO: 1722 - DNA, 19 bp, Homo sapiens
tcggccgattcccaccagc

SEQ ID NO: 1723 - DNA, 17 bp, Homo sapiens
tcggccgattgacaccc

SEQ ID NO: 1724 - DNA, 18 bp, Homo sapiens
tcggccgattgacacccg

SEQ ID NO: 1725 - DNA, 17 bp, Homo sapiens
tcgggtcagtaacttag

SEQ ID NO: 1726 - DNA, 19 bp, Homo sapiens
tcgtacctagcctatagtt

SEQ ID NO: 1727 - DNA, 17 bp, Homo sapiens
tcgtacctagcgtatat

SEQ ID NO: 1728 - DNA, 18 bp, Homo sapiens
tcgtccgattaacccggc

SEQ ID NO: 1729 - DNA, 18 bp, Homo sapiens
tcgtccgattacccccgg

SEQ ID NO: 1730 - DNA, 18 bp, Homo sapiens
tcgtggattccgccaaga

SEQ ID NO: 1731 - DNA, 18 bp, Homo sapiens
tcgtggcaaattcgccac

SEQ ID NO: 1732 - DNA, 22 bp, Homo sapiens
tcgtgtttgtatcgccacccag

SEQ ID NO: 1733 - DNA, 19 bp, Homo sapiens
tctccagtaggacgatgtt

SEQ ID NO: 1734 - DNA, 17 bp, Homo sapiens
tctccccgcgtgtgttt

SEQ ID NO: 1735 - DNA, 17 bp, Homo sapiens
tctcccctcctacagtt

SEQ ID NO: 1736 - DNA, 17 bp, Homo sapiens
tctgtctccatccagag

SEQ ID NO: 1737 - DNA, 17 bp, Homo sapiens
tctgttaaagtgacact

SEQ ID NO: 1738 - DNA, 18 bp, Homo sapiens
tcttgcttctctttctgt

SEQ ID NO: 1739 - DNA, 17 bp, Homo sapiens
tctttttcggggtcgaa

SEQ ID NO: 1740 - DNA, 19 bp, Homo sapiens
tgaaaatcgccacccaggc

SEQ ID NO: 1741 - DNA, 20 bp, Homo sapiens
tgaaggctagctgatggacc

SEQ ID NO: 1742 - DNA, 23 bp, Homo sapiens
tgaaggctagctgatggaccaag

SEQ ID NO: 1743 - DNA, 17 bp, Homo sapiens
tgacagatcagaaccga

SEQ ID NO: 1744 - DNA, 28 bp, Homo sapiens
tgacagtggcatcatctgcggtatcaat

SEQ ID NO: 1745 - DNA, 17 bp, Homo sapiens
tgacgaattggtgtaga

SEQ ID NO: 1746 - DNA, 17 bp, Homo sapiens
tgacgaattggtgttag

SEQ ID NO: 1747 - DNA, 17 bp, Homo sapiens
tgacgattgttgtagga

SEQ ID NO: 1748 - DNA, 17 bp, Homo sapiens
tgactgggcatccactc

SEQ ID NO: 1749 - DNA, 18 bp, Homo sapiens
tgactttgccatccgttg

SEQ ID NO: 1750 - DNA, 17 bp, Homo sapiens
tgagacaggtccagagc

SEQ ID NO: 1751 - DNA, 18 bp, Homo sapiens
tgagattttcatgaggta

SEQ ID NO: 1752 - DNA, 17 bp, Homo sapiens
tgaggtgctccagaggg

SEQ ID NO: 1753 - DNA, 20 bp, Homo sapiens
tgaggttgtgcgagcgtgaa

SEQ ID NO: 1754 - DNA, 19 bp, Homo sapiens
tgatccagcttgcccgtcc

SEQ ID NO: 1755 - DNA, 20 bp, Homo sapiens
tgatggcggcactctgagtc

SEQ ID NO: 1756 - DNA, 20 bp, Homo sapiens
tgcaactgtctctcttctca

SEQ ID NO: 1757 - DNA, 21 bp, Homo sapiens
tgcaccacccagcctcgtacc

SEQ ID NO: 1758 - DNA, 18 bp, Homo sapiens
tgcagcgtgaggaaccag

SEQ ID NO: 1759 - DNA, 17 bp, Homo sapiens
tgcccaacttgggggag

SEQ ID NO: 1760 - DNA, 32 bp, Homo sapiens
tgcccatgccacggccgccttctgagaataac

SEQ ID NO: 1761 - DNA, 17 bp, Homo sapiens
tgccccccataccgggt

SEQ ID NO: 1762 - DNA, 19 bp, Homo sapiens
tgccccctgaggtgtctcc

SEQ ID NO: 1763 - DNA, 18 bp, Homo sapiens
tgcccgtatggccgaaga

SEQ ID NO: 1764 - DNA, 17 bp, Homo sapiens
tgccggatacccctcca

SEQ ID NO: 1765 - DNA, 17 bp, Homo sapiens
tgcctcggccgatttac

SEQ ID NO: 1766 - DNA, 24 bp, Homo sapiens
tgcgtgcccgcacgctaaacttct

SEQ ID NO: 1767 - DNA, 19 bp, Homo sapiens
tgctgtcaagggggcgcag

SEQ ID NO: 1768 - DNA, 18 bp, Homo sapiens
tggatgacattctttcag

SEQ ID NO: 1769 - DNA, 49 bp, Homo sapiens
tggcaatgaaagcccctagaacaacttggctctccgcacaggcttggac

SEQ ID NO: 1770 - DNA, 27 bp, Homo sapiens
tggcagagtgagacccattcttagaag

SEQ ID NO: 1771 - DNA, 17 bp, Homo sapiens
tggccctttctgggccc

SEQ ID NO: 1772 - DNA, 18 bp, Homo sapiens
tggggcatcaaggatagt

SEQ ID NO: 1773 - DNA, 17 bp, Homo sapiens
tggtatatcaaatacat

SEQ ID NO: 1774 - DNA, 17 bp, Homo sapiens
tggtcgatctctctgct

SEQ ID NO: 1775 - DNA, 17 bp, Homo sapiens
tggtcggctttcagagt

SEQ ID NO: 1776 - DNA, 17 bp, Homo sapiens
tggtcttccggcacttc

SEQ ID NO: 1777 - DNA, 17 bp, Homo sapiens
tggtggccacgcatgcg

SEQ ID NO: 1778 - DNA, 17 bp, Homo sapiens
tggtgggtgccggcccg

SEQ ID NO: 1779 - DNA, 21 bp, Homo sapiens
tgtactgggcacagctgctca

SEQ ID NO: 1780 - DNA, 18 bp, Homo sapiens
tgtatgtattactccgag

SEQ ID NO: 1781 - DNA, 18 bp, Homo sapiens
tgtgcctcggccgattaa

SEQ ID NO: 1782 - DNA, 17 bp, Homo sapiens
tgtgtctcctcttttgt

SEQ ID NO: 1783 - DNA, 17 bp, Homo sapiens
tgtgtgttctctctccg

SEQ ID NO: 1784 - DNA, 18 bp, Homo sapiens
tgttcaggtgtagcccca

SEQ ID NO: 1785 - DNA, 18 bp, Homo sapiens
tgttgtctacgagtgtca

SEQ ID NO: 1786 - DNA, 19 bp, Homo sapiens
tgtttccggtagcctcatg

SEQ ID NO: 1787 - DNA, 17 bp, Homo sapiens
tgttttgttatgactgc

SEQ ID NO: 1788 - DNA, 24 bp, Homo sapiens
ttaaaacccagcctcgtacctagc

SEQ ID NO: 1789 - DNA, 19 bp, Homo sapiens
ttaatcctcttaaagtgcc

SEQ ID NO: 1790 - DNA, 17 bp, Homo sapiens
ttaatggtaaggtgctg

SEQ ID NO: 1791 - DNA, 17 bp, Homo sapiens
ttagtttggcctcaata

SEQ ID NO: 1792 - DNA, 17 bp, Homo sapiens
ttatagtgtttagagag

SEQ ID NO: 1793 - DNA, 17 bp, Homo sapiens
ttatcccgtatcggagg

SEQ ID NO: 1794 - DNA, 18 bp, Homo sapiens
ttcaataattttatgtac

SEQ ID NO: 1795 - DNA, 18 bp, Homo sapiens
ttcagccactgtctcgtg

SEQ ID NO: 1796 - DNA, 18 bp, Homo sapiens
ttcaggaaagccattttc

SEQ ID NO: 1797 - DNA, 17 bp, Homo sapiens
ttccaaaaactacccag

SEQ ID NO: 1798 - DNA, 19 bp, Homo sapiens
ttccagctttgttaccaga

SEQ ID NO: 1799 - DNA, 17 bp, Homo sapiens
ttcccaggtacctgctg

SEQ ID NO: 1800 - DNA, 17 bp, Homo sapiens
ttcgctgagatggcata

SEQ ID NO: 1801 - DNA, 18 bp, Homo sapiens
ttcgggccgcgaccccca

SEQ ID NO: 1802 - DNA, 17 bp, Homo sapiens
ttcgttgatcatgctct

SEQ ID NO: 1803 - DNA, 19 bp, Homo sapiens
ttctccgaccagctcgtca

SEQ ID NO: 1804 - DNA, 17 bp, Homo sapiens
ttctctccaggatttga

SEQ ID NO: 1805 - DNA, 17 bp, Homo sapiens
ttctgtgtcgtgtttgt

SEQ ID NO: 1806 - DNA, 17 bp, Homo sapiens
ttcttcttgtctctcct

SEQ ID NO: 1807 - DNA, 17 bp, Homo sapiens
ttgaccatggaagcccc

SEQ ID NO: 1808 - DNA, 17 bp, Homo sapiens
ttgagcttctctaggcc

SEQ ID NO: 1809 - DNA, 17 bp, Homo sapiens
ttgattcagctttgccg

SEQ ID NO: 1810 - DNA, 18 bp, Homo sapiens
ttgccatccttacgcgtg

SEQ ID NO: 1811 - DNA, 18 bp, Homo sapiens
ttgcccctcacacctgtg

SEQ ID NO: 1812 - DNA, 17 bp, Homo sapiens
ttgggggcaagcggggg

SEQ ID NO: 1813 - DNA, 17 bp, Homo sapiens
ttggtcttacgagtgtc

SEQ ID NO: 1814 - DNA, 18 bp, Homo sapiens
ttggttccaaatgtaatg

SEQ ID NO: 1815 - DNA, 27 bp, Homo sapiens
ttgtccgtggagtacatgatgatgttg

SEQ ID NO: 1816 - DNA, 17 bp, Homo sapiens
ttgtgttggttcgtttt

SEQ ID NO: 1817 - DNA, 17 bp, Homo sapiens
ttgtgtttgtgtgcttg

SEQ ID NO: 1818 - DNA, 17 bp, Homo sapiens
ttgttgtgttgtgtagt

SEQ ID NO: 1819 - DNA, 17 bp, Homo sapiens
ttgttgtttgtgtttga

SEQ ID NO: 1820 - DNA, 17 bp, Homo sapiens
tttagacagaaactcac

SEQ ID NO: 1821 - DNA, 30 bp, Homo sapiens
tttagctctgacatggcgagctatgtcggt

SEQ ID NO: 1822 - DNA, 19 bp, Homo sapiens
tttcctttcggccctcgtg

SEQ ID NO: 1823 - DNA, 17 bp, Homo sapiens
tttggtccttctggtgg

SEQ ID NO: 1824 - DNA, 18 bp, Homo sapiens
tttgtattcgccacccag

SEQ ID NO: 1825 - DNA, 20 bp, Homo sapiens
ttttgaactactatccccaa

SEQ ID NO: 1826 - DNA, 19 bp, Homo sapiens
aaaaaaggggaatttcccc

SEQ ID NO: 1827 - DNA, 19 bp, Homo sapiens
aaaaagagtctttcactcc

SEQ ID NO: 1828 - DNA, 18 bp, Homo sapiens
aaaaaggggcgccgctcg

SEQ ID NO: 1829 - DNA, 17 bp, Homo sapiens
aaaaagttagcagaagc

SEQ ID NO: 1830 - DNA, 17 bp, Homo sapiens
aaaactggtacctaact

SEQ ID NO: 1831 - DNA, 17 bp, Homo sapiens
aaaagggaagggggttc

SEQ ID NO: 1832 - DNA, 17 bp, Homo sapiens
aaaagggtatattgttt

SEQ ID NO: 1833 - DNA, 17 bp, Homo sapiens
aaaatggctcccatcat

SEQ ID NO: 1834 - DNA, 27 bp, Homo sapiens
aaacacccagcctcgtacctagcctaa

SEQ ID NO: 1835 - DNA, 17 bp, Homo sapiens
aaacagagaaacaacga

SEQ ID NO: 1836 - DNA, 22 bp, Homo sapiens
aaacccagcctcgtacctagca

SEQ ID NO: 1837 - DNA, 20 bp, Homo sapiens
aaacccagcctctacctagc

SEQ ID NO: 1838 - DNA, 18 bp, Homo sapiens
aaagggcgctttaaagaa

SEQ ID NO: 1839 - DNA, 18 bp, Homo sapiens
aaagggtggaccacccat

SEQ ID NO: 1840 - DNA, 25 bp, Homo sapiens
aaatacactcagtagtgtttctcca

SEQ ID NO: 1841 - DNA, 17 bp, Homo sapiens
aaatctggggcccctcg

SEQ ID NO: 1842 - DNA, 22 bp, Homo sapiens
aaatgtatcaaacgaacataag

SEQ ID NO: 1843 - DNA, 17 bp, Homo sapiens
aaattgggcaccatggg

SEQ ID NO: 1844 - DNA, 23 bp, Homo sapiens
aacaccagcctcgtactagccta

SEQ ID NO: 1845 - DNA, 18 bp, Homo sapiens
aacaccaggcctctacta

SEQ ID NO: 1846 - DNA, 27 bp, Homo sapiens
aacacccagcctcgtacctagccgtat

SEQ ID NO: 1847 - DNA, 19 bp, Homo sapiens
aacacccagcctcgtactt

SEQ ID NO: 1848 - DNA, 19 bp, Homo sapiens
aacacccaggcctcgcacc

SEQ ID NO: 1849 - DNA, 22 bp, Homo sapiens
aacacccagtcctcgtacctag

SEQ ID NO: 1850 - DNA, 18 bp, Homo sapiens
aacaccggcctctaccta

SEQ ID NO: 1851 - DNA, 23 bp, Homo sapiens
aacaggatgggacacgatatggt

SEQ ID NO: 1852 - DNA, 17 bp, Homo sapiens
aacatccggagagcagc

SEQ ID NO: 1853 - DNA, 17 bp, Homo sapiens
aaccacacaacaacgag

SEQ ID NO: 1854 - DNA, 27 bp, Homo sapiens
aaccacccaggcctcgtacctagccta

SEQ ID NO: 1855 - DNA, 26 bp, Homo sapiens
aaccacccggcctcgtacctagccta

SEQ ID NO: 1856 - DNA, 18 bp, Homo sapiens
aaccaggctcgtactagc

SEQ ID NO: 1857 - DNA, 17 bp, Homo sapiens
aaccagtgccttgttgt

SEQ ID NO: 1858 - DNA, 19 bp, Homo sapiens
aacccagctcgtacctagc

SEQ ID NO: 1859 - DNA, 19 bp, Homo sapiens
aacccaggctcgtactagc

SEQ ID NO: 1860 - DNA, 19 bp, Homo sapiens
aacccagggccgaagagca

SEQ ID NO: 1861 - DNA, 17 bp, Homo sapiens
aaccttccgtccacata

SEQ ID NO: 1862 - DNA, 38 bp, Homo sapiens
aacgcctgtcctttagtcacaataaaatagaggtgctg

SEQ ID NO: 1863 - DNA, 17 bp, Homo sapiens
aacggattctggactgg

SEQ ID NO: 1864 - DNA, 21 bp, Homo sapiens
aacgggcgcagccgacgctct

SEQ ID NO: 1865 - DNA, 17 bp, Homo sapiens
aacgtgtggtgggccgc

SEQ ID NO: 1866 - DNA, 17 bp, Homo sapiens
aactacccagactgtgt

SEQ ID NO: 1867 - DNA, 17 bp, Homo sapiens
aactcacaggacattaa

SEQ ID NO: 1868 - DNA, 19 bp, Homo sapiens
aactcacaggacattaacc

SEQ ID NO: 1869 - DNA, 17 bp, Homo sapiens
aactgctaacttgtcta

SEQ ID NO: 1870 - DNA, 17 bp, Homo sapiens
aagattccagttttgga

SEQ ID NO: 1871 - DNA, 17 bp, Homo sapiens
aagccactccttgagcg

SEQ ID NO: 1872 - DNA, 20 bp, Homo sapiens
aagcgagttgcgggggatct

SEQ ID NO: 1873 - DNA, 17 bp, Homo sapiens
aagggggaggttttggt

SEQ ID NO: 1874 - DNA, 17 bp, Homo sapiens
aagggtcaaactgctcc

SEQ ID NO: 1875 - DNA, 17 bp, Homo sapiens
aagggtggaccacccat

SEQ ID NO: 1876 - DNA, 17 bp, Homo sapiens
aagtcctccctctcgtg

SEQ ID NO: 1877 - DNA, 18 bp, Homo sapiens
aagtgtagctatgtgtaa

SEQ ID NO: 1878 - DNA, 17 bp, Homo sapiens
aataaatatcacagctg

SEQ ID NO: 1879 - DNA, 58 bp, Homo sapiens
aataatgggcgcacttcagatgccactcctcaaattcgtcaaagggttcaatattttc

SEQ ID NO: 1880 - DNA, 65 bp, Homo sapiens
aataatgggcgcacttcagatgccactcctcaaattcgtcaaagggttcaatattttccacccgc

SEQ ID NO: 1881 - DNA, 19 bp, Homo sapiens
aatagatggcagccttttc

SEQ ID NO: 1882 - DNA, 28 bp, Homo sapiens
aatgccacaactaaaagacagttatctc

SEQ ID NO: 1883 - DNA, 19 bp, Homo sapiens
aatgcgaaaagtgaactgt

SEQ ID NO: 1884 - DNA, 20 bp, Homo sapiens
aatgcgaaaagtgaactgtt

SEQ ID NO: 1885 - DNA, 17 bp, Homo sapiens
aatgcgagaaacatact

SEQ ID NO: 1886 - DNA, 17 bp, Homo sapiens
aattaggacgcttgtaa

SEQ ID NO: 1887 - DNA, 17 bp, Homo sapiens
aattatgtatagcaggt

SEQ ID NO: 1888 - DNA, 19 bp, Homo sapiens
aattctgcattttcatttc

SEQ ID NO: 1889 - DNA, 17 bp, Homo sapiens
aattttccccttcccag

SEQ ID NO: 1890 - DNA, 21 bp, Homo sapiens
acaaactccacgttgtcatca

SEQ ID NO: 1891 - DNA, 18 bp, Homo sapiens
acaaattataagtcttag

SEQ ID NO: 1892 - DNA, 25 bp, Homo sapiens
acaacacccagcctcgtacctagcc

SEQ ID NO: 1893 - DNA, 17 bp, Homo sapiens
acaacctcccaacttgg

SEQ ID NO: 1894 - DNA, 18 bp, Homo sapiens
acaactcaacccagaaat

SEQ ID NO: 1895 - DNA, 17 bp, Homo sapiens
acacacagtctgaatgg

SEQ ID NO: 1896 - DNA, 22 bp, Homo sapiens
acacaccaggcctcgtacctag

SEQ ID NO: 1897 - DNA, 27 bp, Homo sapiens
acaccacccagcctcgtacctagccta

SEQ ID NO: 1898 - DNA, 19 bp, Homo sapiens
acaccagcctcgactagcc

SEQ ID NO: 1899 - DNA, 27 bp, Homo sapiens
acaccagcctcgtacctagcctaagtt

SEQ ID NO: 1900 - DNA, 19 bp, Homo sapiens
acaccagcctgtactagcc

SEQ ID NO: 1901 - DNA, 17 bp, Homo sapiens
acaccagtgtactgaag

SEQ ID NO: 1902 - DNA, 17 bp, Homo sapiens
acacccagcccgtacct

SEQ ID NO: 1903 - DNA, 30 bp, Homo sapiens
acacccagcctcgtacctagccgtaagttt

SEQ ID NO: 1904 - DNA, 27 bp, Homo sapiens
acacccaggcctcgtacctagccgtaa

SEQ ID NO: 1905 - DNA, 17 bp, Homo sapiens
acacccgagcctcgtac

SEQ ID NO: 1906 - DNA, 24 bp, Homo sapiens
acacccgcctcgtacctagcctat

SEQ ID NO: 1907 - DNA, 17 bp, Homo sapiens
acacccgcctctactag

SEQ ID NO: 1908 - DNA, 17 bp, Homo sapiens
acacccggcctcgacta

SEQ ID NO: 1909 - DNA, 19 bp, Homo sapiens
acaccgaccgcggggtata

SEQ ID NO: 1910 - DNA, 23 bp, Homo sapiens
acaccggcgacaacgcaatgctc

SEQ ID NO: 1911 - DNA, 17 bp, Homo sapiens
acacgttcagaccagtc

SEQ ID NO: 1912 - DNA, 20 bp, Homo sapiens
acaggccgcctgcgggctct

SEQ ID NO: 1913 - DNA, 24 bp, Homo sapiens
acatcacggatgtaagcagtgcaa

SEQ ID NO: 1914 - DNA, 17 bp, Homo sapiens
acatctaagcaaggttt

SEQ ID NO: 1915 - DNA, 17 bp, Homo sapiens
accaagctgggggccag

SEQ ID NO: 1916 - DNA, 19 bp, Homo sapiens
accaaggcaagcccagagt

SEQ ID NO: 1917 - DNA, 26 bp, Homo sapiens
accacccaggcctcgtacctagccta

SEQ ID NO: 1918 - DNA, 19 bp, Homo sapiens
accactggaacccagtggc

SEQ ID NO: 1919 - DNA, 19 bp, Homo sapiens
accagaactccagcggtcc

SEQ ID NO: 1920 - DNA, 18 bp, Homo sapiens
accagaaggcacaatcag

SEQ ID NO: 1921 - DNA, 20 bp, Homo sapiens
accagaaggcacaatcagag

SEQ ID NO: 1922 - DNA, 18 bp, Homo sapiens
accagatccgttgactcc

SEQ ID NO: 1923 - DNA, 17 bp, Homo sapiens
accagccagagtaggga

SEQ ID NO: 1924 - DNA, 17 bp, Homo sapiens
accagcctgtactagcc

SEQ ID NO: 1925 - DNA, 19 bp, Homo sapiens
accaggagggggcccatca

SEQ ID NO: 1926 - DNA, 17 bp, Homo sapiens
accaggctcgacctagc

SEQ ID NO: 1927 - DNA, 17 bp, Homo sapiens
accatcctggagagcag

SEQ ID NO: 1928 - DNA, 18 bp, Homo sapiens
accatctgctataagcgt

SEQ ID NO: 1929 - DNA, 18 bp, Homo sapiens
accatttatggctgttat

SEQ ID NO: 1930 - DNA, 34 bp, Homo sapiens
accatttatggctgttatcctaacacctacgtcg

SEQ ID NO: 1931 - DNA, 18 bp, Homo sapiens
accatttcgggactttcc

SEQ ID NO: 1932 - DNA, 17 bp, Homo sapiens
acccaagggcgtggaaa

SEQ ID NO: 1933 - DNA, 25 bp, Homo sapiens
acccaagggcgtggaaaacgctcct

SEQ ID NO: 1934 - DNA, 17 bp, Homo sapiens
acccacctgttgctcag

SEQ ID NO: 1935 - DNA, 17 bp, Homo sapiens
acccagcctcacctagc

SEQ ID NO: 1936 - DNA, 23 bp, Homo sapiens
acccagcctcgtacctagacctt

SEQ ID NO: 1937 - DNA, 22 bp, Homo sapiens
acccagcctcgtacctagacta

SEQ ID NO: 1938 - DNA, 22 bp, Homo sapiens
acccagcctcgtacctagccat

SEQ ID NO: 1939 - DNA, 23 bp, Homo sapiens
acccagcctcgtacctagccgat

SEQ ID NO: 1940 - DNA, 26 bp, Homo sapiens
acccagcctcgtacctagcctaacgt

SEQ ID NO: 1941 - DNA, 19 bp, Homo sapiens
acccagctcgtacctagcc

SEQ ID NO: 1942 - DNA, 18 bp, Homo sapiens
acccaggctcgacctagc

SEQ ID NO: 1943 - DNA, 17 bp, Homo sapiens
accccggcctcgtcctg

SEQ ID NO: 1944 - DNA, 23 bp, Homo sapiens
acccctacggcaacgcttgtccc

SEQ ID NO: 1945 - DNA, 19 bp, Homo sapiens
acccgcctcgtacctagct

SEQ ID NO: 1946 - DNA, 22 bp, Homo sapiens
acccggcctcgcacctagccta

SEQ ID NO: 1947 - DNA, 23 bp, Homo sapiens
acccggcctcgctacctagccta

SEQ ID NO: 1948 - DNA, 19 bp, Homo sapiens
acccggcctcgtcctagcc

SEQ ID NO: 1949 - DNA, 21 bp, Homo sapiens
acccgggcctcgtacctagcc

SEQ ID NO: 1950 - DNA, 18 bp, Homo sapiens
accctcggtgccgattca

SEQ ID NO: 1951 - DNA, 17 bp, Homo sapiens
accctcgtccgattcac

SEQ ID NO: 1952 - DNA, 24 bp, Homo sapiens
acccttgcagaattcctaaagcag

SEQ ID NO: 1953 - DNA, 27 bp, Homo sapiens
acccttgcagaattcctaaagcagcat

SEQ ID NO: 1954 - DNA, 18 bp, Homo sapiens
accgagtgcttctggcga

SEQ ID NO: 1955 - DNA, 29 bp, Homo sapiens
acctaccgcagcaatttcagcagtggccc

SEQ ID NO: 1956 - DNA, 18 bp, Homo sapiens
acctcatccgttgagaga

SEQ ID NO: 1957 - DNA, 17 bp, Homo sapiens
acctgctcaagattgat

SEQ ID NO: 1958 - DNA, 17 bp, Homo sapiens
acctgtgccacacaccc

SEQ ID NO: 1959 - DNA, 17 bp, Homo sapiens
acgaaaggaaaaggaga

SEQ ID NO: 1960 - DNA, 18 bp, Homo sapiens
acgaggttcctcatatct

SEQ ID NO: 1961 - DNA, 17 bp, Homo sapiens
acgagtgtcagtaactc

SEQ ID NO: 1962 - DNA, 18 bp, Homo sapiens
acgcagctcgtacctagc

SEQ ID NO: 1963 - DNA, 17 bp, Homo sapiens
acgcaggggcatattcc

SEQ ID NO: 1964 - DNA, 20 bp, Homo sapiens
acgctctagggcatagctct

SEQ ID NO: 1965 - DNA, 24 bp, Homo sapiens
acggggtatgctccaatagtcaat

SEQ ID NO: 1966 - DNA, 25 bp, Homo sapiens
acggggtatgctccaatagtcaatg

SEQ ID NO: 1967 - DNA, 25 bp, Homo sapiens
acggtcaagaagattccttgctgtt

SEQ ID NO: 1968 - DNA, 18 bp, Homo sapiens
acgtcgagtcctaggctc

SEQ ID NO: 1969 - DNA, 17 bp, Homo sapiens
acgtctcccggacaaca

SEQ ID NO: 1970 - DNA, 18 bp, Homo sapiens
acgtctcccggacaacat

SEQ ID NO: 1971 - DNA, 26 bp, Homo sapiens
actacagcttccggcgtgctttgcgc

SEQ ID NO: 1972 - DNA, 20 bp, Homo sapiens
actacattatactaaagttt

SEQ ID NO: 1973 - DNA, 17 bp, Homo sapiens
actcagagcggacagtc

SEQ ID NO: 1974 - DNA, 17 bp, Homo sapiens
actcagatgcgaggtgg

SEQ ID NO: 1975 - DNA, 17 bp, Homo sapiens
actcatttaaaagaact

SEQ ID NO: 1976 - DNA, 21 bp, Homo sapiens
actccacgttgtcatcacagc

SEQ ID NO: 1977 - DNA, 17 bp, Homo sapiens
actccagcatcagcttc

SEQ ID NO: 1978 - DNA, 17 bp, Homo sapiens
actccccaccacactct

SEQ ID NO: 1979 - DNA, 18 bp, Homo sapiens
actccgcagcgtacttct

SEQ ID NO: 1980 - DNA, 24 bp, Homo sapiens
actcgaagaagatgacgtggctga

SEQ ID NO: 1981 - DNA, 21 bp, Homo sapiens
actcgttgttacccgttgatg

SEQ ID NO: 1982 - DNA, 17 bp, Homo sapiens
actctcggtttccaggt

SEQ ID NO: 1983 - DNA, 18 bp, Homo sapiens
actctcggtttccaggta

SEQ ID NO: 1984 - DNA, 18 bp, Homo sapiens
actgagagaccgttccat

SEQ ID NO: 1985 - DNA, 19 bp, Homo sapiens
actgccggatacccctcca

SEQ ID NO: 1986 - DNA, 22 bp, Homo sapiens
actgcgtccagtgaagtcacat

SEQ ID NO: 1987 - DNA, 20 bp, Homo sapiens
actgctcctgcgcttcatgt

SEQ ID NO: 1988 - DNA, 17 bp, Homo sapiens
actgggtccgggaaccg

SEQ ID NO: 1989 - DNA, 19 bp, Homo sapiens
acttaactctcatccagct

SEQ ID NO: 1990 - DNA, 17 bp, Homo sapiens
acttccgtgtgtaacgt

SEQ ID NO: 1991 - DNA, 17 bp, Homo sapiens
acttgcgtggtgtgtca

SEQ ID NO: 1992 - DNA, 17 bp, Homo sapiens
actttataggaaaaagg

SEQ ID NO: 1993 - DNA, 31 bp, Homo sapiens
agaaaaattacttttgcttccttgaatcgac

SEQ ID NO: 1994 - DNA, 17 bp, Homo sapiens
agaaaatatataggggg

SEQ ID NO: 1995 - DNA, 18 bp, Homo sapiens
agaaactgttgggttagc

SEQ ID NO: 1996 - DNA, 17 bp, Homo sapiens
agaaagtacagattcag

SEQ ID NO: 1997 - DNA, 18 bp, Homo sapiens
agaagcttctcaaacaca

SEQ ID NO: 1998 - DNA, 17 bp, Homo sapiens
agaccctgcaacatgcg

SEQ ID NO: 1999 - DNA, 19 bp, Homo sapiens
agaccctgcaacatgcgga

SEQ ID NO: 2000 - DNA, 19 bp, Homo sapiens
agactctgtttggttctta

SEQ ID NO: 2001 - DNA, 20 bp, Homo sapiens
agactctgtttggttcttac

SEQ ID NO: 2002 - DNA, 17 bp, Homo sapiens
agactttcacctctggc

SEQ ID NO: 2003 - DNA, 19 bp, Homo sapiens
agactttcacctctggcaa

SEQ ID NO: 2004 - DNA, 17 bp, Homo sapiens
agaggtggttaaatatg

SEQ ID NO: 2005 - DNA, 18 bp, Homo sapiens
agatcaccggcctggacg

SEQ ID NO: 2006 - DNA, 20 bp, Homo sapiens
agatcttatgccaattctta

SEQ ID NO: 2007 - DNA, 17 bp, Homo sapiens
agatgaggcgtatgaac

SEQ ID NO: 2008 - DNA, 19 bp, Homo sapiens
agatgagtactgaatggtc

SEQ ID NO: 2009 - DNA, 17 bp, Homo sapiens
agatgatagatctcctc

SEQ ID NO: 2010 - DNA, 19 bp, Homo sapiens
agatgatagatctcctcca

SEQ ID NO: 2011 - DNA, 18 bp, Homo sapiens
agcaaggccagggaaggt

SEQ ID NO: 2012 - DNA, 17 bp, Homo sapiens
agcaattcagtaaaatg

SEQ ID NO: 2013 - DNA, 19 bp, Homo sapiens
agcacaataaactacagcc

SEQ ID NO: 2014 - DNA, 19 bp, Homo sapiens
agcacgagtcttgggccaa

SEQ ID NO: 2015 - DNA, 17 bp, Homo sapiens
agcactcccacagcacg

SEQ ID NO: 2016 - DNA, 17 bp, Homo sapiens
agcactgttgtaagcag

SEQ ID NO: 2017 - DNA, 40 bp, Homo sapiens
agccacgaactgttcctgtatcctctaatgatacacctcc

SEQ ID NO: 2018 - DNA, 17 bp, Homo sapiens
agccaggtcagcagcct

SEQ ID NO: 2019 - DNA, 17 bp, Homo sapiens
agccagtcatcggatac

SEQ ID NO: 2020 - DNA, 22 bp, Homo sapiens
agccgaagagagtcggaagaac

SEQ ID NO: 2021 - DNA, 17 bp, Homo sapiens
agccgtcaccctctgcc

SEQ ID NO: 2022 - DNA, 19 bp, Homo sapiens
agcctcgacctagcctaat

SEQ ID NO: 2023 - DNA, 20 bp, Homo sapiens
agcctcgctacctagcctaa

SEQ ID NO: 2024 - DNA, 20 bp, Homo sapiens
agcctcgtacctagaccgtt

SEQ ID NO: 2025 - DNA, 17 bp, Homo sapiens
agcctcgtactagctat

SEQ ID NO: 2026 - DNA, 18 bp, Homo sapiens
agcctctacctagcctaa

SEQ ID NO: 2027 - DNA, 18 bp, Homo sapiens
agcgactatcaggacagc

SEQ ID NO: 2028 - DNA, 17 bp, Homo sapiens
agcggcactgccagagg

SEQ ID NO: 2029 - DNA, 17 bp, Homo sapiens
agcggtgattttgagag

SEQ ID NO: 2030 - DNA, 18 bp, Homo sapiens
agcgtccccgcgcgcaag

SEQ ID NO: 2031 - DNA, 21 bp, Homo sapiens
agcgtccccgcgcgcaagaag

SEQ ID NO: 2032 - DNA, 19 bp, Homo sapiens
agctatgcttgtgaaaaaa

SEQ ID NO: 2033 - DNA, 26 bp, Homo sapiens
agctcgagggagcgctgctttcctga

SEQ ID NO: 2034 - DNA, 17 bp, Homo sapiens
agcttcggatgatcatg

SEQ ID NO: 2035 - DNA, 17 bp, Homo sapiens
aggaagattcggccacg

SEQ ID NO: 2036 - DNA, 21 bp, Homo sapiens
aggagcccagtggcctacaat

SEQ ID NO: 2037 - DNA, 26 bp, Homo sapiens
aggaggtcgaatctgacacagcacat

SEQ ID NO: 2038 - DNA, 26 bp, Homo sapiens
aggattaaatgaggctgggcatataa

SEQ ID NO: 2039 - DNA, 20 bp, Homo sapiens
aggcatgtttagcactggct

SEQ ID NO: 2040 - DNA, 24 bp, Homo sapiens
aggcctcgtacctagccgtaattt

SEQ ID NO: 2041 - DNA, 19 bp, Homo sapiens
aggcctcgtactagccgta

SEQ ID NO: 2042 - DNA, 26 bp, Homo sapiens
aggcctggacatcggccttgtagcaa

SEQ ID NO: 2043 - DNA, 17 bp, Homo sapiens
aggcgaaagggggcgtg

SEQ ID NO: 2044 - DNA, 19 bp, Homo sapiens
aggcttcggaaaaacatga

SEQ ID NO: 2045 - DNA, 27 bp, Homo sapiens
agggaaaaccgaagaatccgagaactt

SEQ ID NO: 2046 - DNA, 17 bp, Homo sapiens
agggaaatgccacgtgt

SEQ ID NO: 2047 - DNA, 17 bp, Homo sapiens
agggaattcctgaatag

SEQ ID NO: 2048 - DNA, 19 bp, Homo sapiens
agggaccgtatgttctcct

SEQ ID NO: 2049 - DNA, 17 bp, Homo sapiens
agggctttcattgacga

SEQ ID NO: 2050 - DNA, 23 bp, Homo sapiens
aggggcaaagcgggtcttcacaa

SEQ ID NO: 2051 - DNA, 17 bp, Homo sapiens
aggggcagccagccccc

SEQ ID NO: 2052 - DNA, 17 bp, Homo sapiens
agggtacgagcaacagt

SEQ ID NO: 2053 - DNA, 17 bp, Homo sapiens
agggttcttttttccgg

SEQ ID NO: 2054 - DNA, 18 bp, Homo sapiens
aggtaaccaacatccctg

SEQ ID NO: 2055 - DNA, 24 bp, Homo sapiens
aggtacacttcaggatcatcgata

SEQ ID NO: 2056 - DNA, 17 bp, Homo sapiens
aggtggtcaggaactcc

SEQ ID NO: 2057 - DNA, 17 bp, Homo sapiens
aggttgtacatgtgcag

SEQ ID NO: 2058 - DNA, 17 bp, Homo sapiens
agtaagctttgccctgt

SEQ ID NO: 2059 - DNA, 18 bp, Homo sapiens
agtaagtaacgtgcagta

SEQ ID NO: 2060 - DNA, 19 bp, Homo sapiens
agtagaccattgttttgaa

SEQ ID NO: 2061 - DNA, 20 bp, Homo sapiens
agtcaccccaccgctatggg

SEQ ID NO: 2062 - DNA, 17 bp, Homo sapiens
agtccagaggaggaccc

SEQ ID NO: 2063 - DNA, 17 bp, Homo sapiens
agtcccaaatggcagaa

SEQ ID NO: 2064 - DNA, 19 bp, Homo sapiens
agtcccgctgcacggaaga

SEQ ID NO: 2065 - DNA, 17 bp, Homo sapiens
agtgatccgccaccttg

SEQ ID NO: 2066 - DNA, 23 bp, Homo sapiens
agtgccgctggatggtggcctcg

SEQ ID NO: 2067 - DNA, 18 bp, Homo sapiens
agtgtgacggcaaaatgg

SEQ ID NO: 2068 - DNA, 23 bp, Homo sapiens
agtgtggaggacacggttgtcgt

SEQ ID NO: 2069 - DNA, 21 bp, Homo sapiens
agttcgtatcgatccgattat

SEQ ID NO: 2070 - DNA, 17 bp, Homo sapiens
agttcttttaaatgagt

SEQ ID NO: 2071 - DNA, 17 bp, Homo sapiens
agttggggataaaactg

SEQ ID NO: 2072 - DNA, 19 bp, Homo sapiens
agttgtctggtgctaaaga

SEQ ID NO: 2073 - DNA, 18 bp, Homo sapiens
agtttctctgataagatc

SEQ ID NO: 2074 - DNA, 19 bp, Homo sapiens
agtttgggtctctgccaac

SEQ ID NO: 2075 - DNA, 19 bp, Homo sapiens
ataaagcttaaaattataa

SEQ ID NO: 2076 - DNA, 20 bp, Homo sapiens
ataacaagtcaacagatctg

SEQ ID NO: 2077 - DNA, 18 bp, Homo sapiens
ataaggccgtttaaggtt

SEQ ID NO: 2078 - DNA, 17 bp, Homo sapiens
ataaggtcttagagacc

SEQ ID NO: 2079 - DNA, 22 bp, Homo sapiens
atacccataattattataccat

SEQ ID NO: 2080 - DNA, 18 bp, Homo sapiens
ataggaaacttgggaaac

SEQ ID NO: 2081 - DNA, 19 bp, Homo sapiens
ataggaacttgtgaacatc

SEQ ID NO: 2082 - DNA, 19 bp, Homo sapiens
atagggttgttcagagaca

SEQ ID NO: 2083 - DNA, 20 bp, Homo sapiens
ataggtcgacatggcagtaa

SEQ ID NO: 2084 - DNA, 18 bp, Homo sapiens
ataggtttgaagatatgc

SEQ ID NO: 2085 - DNA, 17 bp, Homo sapiens
atataaaacgccccccc

SEQ ID NO: 2086 - DNA, 20 bp, Homo sapiens
atatcgtcgaccacggcgtc

SEQ ID NO: 2087 - DNA, 18 bp, Homo sapiens
atatttcccaccaggcac

SEQ ID NO: 2088 - DNA, 37 bp, Homo sapiens
atcaccaagaacccttgcagaattcctaaagcagcat

SEQ ID NO: 2089 - DNA, 22 bp, Homo sapiens
atcaccgagcgcccacaggttg

SEQ ID NO: 2090 - DNA, 54 bp, Homo sapiens
atcaggacctccgcttgggttagtgcaacacaatggggcatgggaacgatggct

SEQ ID NO: 2091 - DNA, 18 bp, Homo sapiens
atccagctcgttccaact

SEQ ID NO: 2092 - DNA, 20 bp, Homo sapiens
atcccagagcatataaagaa

SEQ ID NO: 2093 - DNA, 17 bp, Homo sapiens
atccgtgtgcgggtgcc

SEQ ID NO: 2094 - DNA, 19 bp, Homo sapiens
atcctttagacatcttctg

SEQ ID NO: 2095 - DNA, 34 bp, Homo sapiens
atcgatttctgtagatggcaatcttcttgacaag

SEQ ID NO: 2096 - DNA, 17 bp, Homo sapiens
atctaaaagtagctttg

SEQ ID NO: 2097 - DNA, 17 bp, Homo sapiens
atctagcgttaaggtgt

SEQ ID NO: 2098 - DNA, 17 bp, Homo sapiens
atctgccctgctccgta

SEQ ID NO: 2099 - DNA, 17 bp, Homo sapiens
atctgtaggcgtcattc

SEQ ID NO: 2100 - DNA, 20 bp, Homo sapiens
atctgtaggcgtcattcatt

SEQ ID NO: 2101 - DNA, 18 bp, Homo sapiens
atctgtctccatccagag

SEQ ID NO: 2102 - DNA, 17 bp, Homo sapiens
atgaagacaaatgctgc

SEQ ID NO: 2103 - DNA, 20 bp, Homo sapiens
atgaagacaaatgctgcagg

SEQ ID NO: 2104 - DNA, 18 bp, Homo sapiens
atgaaggtgactccatct

SEQ ID NO: 2105 - DNA, 18 bp, Homo sapiens
atgagaccacttgcgcca

SEQ ID NO: 2106 - DNA, 19 bp, Homo sapiens
atgagacccctttgcgcca

SEQ ID NO: 2107 - DNA, 18 bp, Homo sapiens
atgaggtccgggtattcc

SEQ ID NO: 2108 - DNA, 20 bp, Homo sapiens
atgatgtccacggaattcgg

SEQ ID NO: 2109 - DNA, 18 bp, Homo sapiens
atgccagaaacctccgca

SEQ ID NO: 2110 - DNA, 17 bp, Homo sapiens
atgcccatgcaacagaa

SEQ ID NO: 2111 - DNA, 17 bp, Homo sapiens
atggacgagagggtgca

SEQ ID NO: 2112 - DNA, 23 bp, Homo sapiens
atggagaacctccagcttggact

SEQ ID NO: 2113 - DNA, 21 bp, Homo sapiens
atggagcagcccctgagggaa

SEQ ID NO: 2114 - DNA, 26 bp, Homo sapiens
atggagggacctcagtgccgactgcc

SEQ ID NO: 2115 - DNA, 21 bp, Homo sapiens
atggcagttggcaaggtctct

SEQ ID NO: 2116 - DNA, 17 bp, Homo sapiens
atggctgcacaagtcac

SEQ ID NO: 2117 - DNA, 19 bp, Homo sapiens
atgggaattagccgagctt

SEQ ID NO: 2118 - DNA, 17 bp, Homo sapiens
atgggtgaatgtgagca

SEQ ID NO: 2119 - DNA, 23 bp, Homo sapiens
atggtatatcaaatacataagac

SEQ ID NO: 2120 - DNA, 17 bp, Homo sapiens
atggtatgtgtggtagt

SEQ ID NO: 2121 - DNA, 17 bp, Homo sapiens
atgtatacggttcttcg

SEQ ID NO: 2122 - DNA, 19 bp, Homo sapiens
atgtcactcagttcgccca

SEQ ID NO: 2123 - DNA, 17 bp, Homo sapiens
atgtcccacaggggcac

SEQ ID NO: 2124 - DNA, 17 bp, Homo sapiens
atgtctgagttggattc

SEQ ID NO: 2125 - DNA, 22 bp, Homo sapiens
atgtgagagatcaaatgtatgt

SEQ ID NO: 2126 - DNA, 17 bp, Homo sapiens
atgttgtcacgcattcc

SEQ ID NO: 2127 - DNA, 25 bp, Homo sapiens
attaaaacccagcctcgtacctagc

SEQ ID NO: 2128 - DNA, 24 bp, Homo sapiens
attaacaccagcctcgtactagcc

SEQ ID NO: 2129 - DNA, 22 bp, Homo sapiens
attacaagcatctgtaaacaaa

SEQ ID NO: 2130 - DNA, 17 bp, Homo sapiens
attcattcatgtccacg

SEQ ID NO: 2131 - DNA, 21 bp, Homo sapiens
attccgaccagatattggcac

SEQ ID NO: 2132 - DNA, 18 bp, Homo sapiens
attctgcattttcatttc

SEQ ID NO: 2133 - DNA, 23 bp, Homo sapiens
attgtaggccactgggctcctcc

SEQ ID NO: 2134 - DNA, 17 bp, Homo sapiens
attgtgttagatcagtc

SEQ ID NO: 2135 - DNA, 20 bp, Homo sapiens
attgttgttaggatccagtc

SEQ ID NO: 2136 - DNA, 22 bp, Homo sapiens
atttattaagtctttagagaca

SEQ ID NO: 2137 - DNA, 18 bp, Homo sapiens
atttctcccgagtgcttt

SEQ ID NO: 2138 - DNA, 17 bp, Homo sapiens
atttcttcccactaaag

SEQ ID NO: 2139 - DNA, 18 bp, Homo sapiens
atttgtttcaagagtaat

SEQ ID NO: 2140 - DNA, 28 bp, Homo sapiens
attttcatacccataattattataccat

SEQ ID NO: 2141 - DNA, 18 bp, Homo sapiens
atttttccccccttgtgt

SEQ ID NO: 2142 - DNA, 18 bp, Homo sapiens
atttttccgagtgctttc

SEQ ID NO: 2143 - DNA, 17 bp, Homo sapiens
caaacagacgctgccca

SEQ ID NO: 2144 - DNA, 17 bp, Homo sapiens
caaattcaaaggacctt

SEQ ID NO: 2145 - DNA, 17 bp, Homo sapiens
caaattcacagggcaat

SEQ ID NO: 2146 - DNA, 28 bp, Homo sapiens
caacacccaggcctcgtacctagccgta

SEQ ID NO: 2147 - DNA, 27 bp, Homo sapiens
caacacccaggcctcgtacctagcctt

SEQ ID NO: 2148 - DNA, 21 bp, Homo sapiens
caacagcgtgttccctggcat

SEQ ID NO: 2149 - DNA, 23 bp, Homo sapiens
caaccagcctcgtacctagccta

SEQ ID NO: 2150 - DNA, 22 bp, Homo sapiens
caactctttgagtacccaggtt

SEQ ID NO: 2151 - DNA, 20 bp, Homo sapiens
caactggcgtgtcaagcaac

SEQ ID NO: 2152 - DNA, 24 bp, Homo sapiens
caagatcgggccgggacttctcac

SEQ ID NO: 2153 - DNA, 19 bp, Homo sapiens
caaggcttgtcatggacga

SEQ ID NO: 2154 - DNA, 17 bp, Homo sapiens
caagggcactcctggaa

SEQ ID NO: 2155 - DNA, 17 bp, Homo sapiens
caataaatggagacagt

SEQ ID NO: 2156 - DNA, 17 bp, Homo sapiens
caatagatgcctcggag

SEQ ID NO: 2157 - DNA, 17 bp, Homo sapiens
caatcatcaactccgga

SEQ ID NO: 2158 - DNA, 19 bp, Homo sapiens
caatgactcctgataggga

SEQ ID NO: 2159 - DNA, 19 bp, Homo sapiens
caatgctacattaacccat

SEQ ID NO: 2160 - DNA, 18 bp, Homo sapiens
caatggcagcatatacaa

SEQ ID NO: 2161 - DNA, 17 bp, Homo sapiens
caatttcctcccctcgt

SEQ ID NO: 2162 - DNA, 23 bp, Homo sapiens
cacaacacccagcctcgtaccta

SEQ ID NO: 2163 - DNA, 17 bp, Homo sapiens
cacaattgccagttttt

SEQ ID NO: 2164 - DNA, 26 bp, Homo sapiens
cacacacccagcctcgtacctagccg

SEQ ID NO: 2165 - DNA, 17 bp, Homo sapiens
cacacactcttgggggg

SEQ ID NO: 2166 - DNA, 21 bp, Homo sapiens
cacaccaggcctcgtacctag

SEQ ID NO: 2167 - DNA, 17 bp, Homo sapiens
cacaccccacacttctt

SEQ ID NO: 2168 - DNA, 21 bp, Homo sapiens
cacacccgcctcgtactagcc

SEQ ID NO: 2169 - DNA, 17 bp, Homo sapiens
cacactgaaggttattc

SEQ ID NO: 2170 - DNA, 17 bp, Homo sapiens
cacatactgaaaatgag

SEQ ID NO: 2171 - DNA, 17 bp, Homo sapiens
cacatatatataacacc

SEQ ID NO: 2172 - DNA, 17 bp, Homo sapiens
cacatgatggcgcagcg

SEQ ID NO: 2173 - DNA, 26 bp, Homo sapiens
caccacccagcctcgtacctagccga

SEQ ID NO: 2174 - DNA, 27 bp, Homo sapiens
caccacccagcctcgtacctagcctta

SEQ ID NO: 2175 - DNA, 21 bp, Homo sapiens
caccacccagcctcgtacctg

SEQ ID NO: 2176 - DNA, 22 bp, Homo sapiens
caccagcctcgtactagcctta

SEQ ID NO: 2177 - DNA, 21 bp, Homo sapiens
caccagcctctacctagcctt

SEQ ID NO: 2178 - DNA, 20 bp, Homo sapiens
cacccagcccgcacctagcc

SEQ ID NO: 2179 - DNA, 17 bp, Homo sapiens
cacccagcctcacctag

SEQ ID NO: 2180 - DNA, 26 bp, Homo sapiens
cacccagcctcgtacctagccgtaat

SEQ ID NO: 2181 - DNA, 27 bp, Homo sapiens
cacccagcctcgtacctagccgtaatt

SEQ ID NO: 2182 - DNA, 23 bp, Homo sapiens
cacccaggcctcgtacctagccc

SEQ ID NO: 2183 - DNA, 19 bp, Homo sapiens
cacccgcctcgtcctagcc

SEQ ID NO: 2184 - DNA, 17 bp, Homo sapiens
cacccggcctcgctcct

SEQ ID NO: 2185 - DNA, 57 bp, Homo sapiens
caccggcaccatctcctgcagcagggacttctcactttggcctttgagcccaaaacc

SEQ ID NO: 2186 - DNA, 17 bp, Homo sapiens
cacgacttcgtttggcc

SEQ ID NO: 2187 - DNA, 18 bp, Homo sapiens
cacgagcctcggccgatt

SEQ ID NO: 2188 - DNA, 25 bp, Homo sapiens
cacgatgggcacgatgccattctgc

SEQ ID NO: 2189 - DNA, 25 bp, Homo sapiens
cacgcccaggatactggcgcccatc

SEQ ID NO: 2190 - DNA, 24 bp, Homo sapiens
cacgctggtgttggggctacagga

SEQ ID NO: 2191 - DNA, 18 bp, Homo sapiens
cacgggtattgcccttga

SEQ ID NO: 2192 - DNA, 18 bp, Homo sapiens
cactcaaaaggtttcatg

SEQ ID NO: 2193 - DNA, 17 bp, Homo sapiens
cactccagcgagctcca

SEQ ID NO: 2194 - DNA, 23 bp, Homo sapiens
cactcttgacagtgttgacaaaa

SEQ ID NO: 2195 - DNA, 17 bp, Homo sapiens
cactggcagtccctggg

SEQ ID NO: 2196 - DNA, 19 bp, Homo sapiens
cactggggtgcccatgtgc

SEQ ID NO: 2197 - DNA, 17 bp, Homo sapiens
cagaaagacaaaggtgc

SEQ ID NO: 2198 - DNA, 24 bp, Homo sapiens
cagacacccagcctcgtacctagc

SEQ ID NO: 2199 - DNA, 17 bp, Homo sapiens
cagagggcttctcataa

SEQ ID NO: 2200 - DNA, 17 bp, Homo sapiens
cagatgctccaggtgct

SEQ ID NO: 2201 - DNA, 17 bp, Homo sapiens
cagattaattccaggat

SEQ ID NO: 2202 - DNA, 17 bp, Homo sapiens
cagcacgcaccctttcg

SEQ ID NO: 2203 - DNA, 17 bp, Homo sapiens
cagcaggaacgcagagc

SEQ ID NO: 2204 - DNA, 18 bp, Homo sapiens
cagcatggaattgacacc

SEQ ID NO: 2205 - DNA, 41 bp, Homo sapiens
cagccacgaactgttcctgtatcctctaatgatacacctcc

SEQ ID NO: 2206 - DNA, 17 bp, Homo sapiens
cagcccaggtgcgtgtg

SEQ ID NO: 2207 - DNA, 20 bp, Homo sapiens
cagcccgccagcgggcgccg

SEQ ID NO: 2208 - DNA, 22 bp, Homo sapiens
cagcctcgctacctagccgtaa

SEQ ID NO: 2209 - DNA, 21 bp, Homo sapiens
cagcctcgctacctagcctaa

SEQ ID NO: 2210 - DNA, 24 bp, Homo sapiens
cagcctcgtacctagccgtaaggt

SEQ ID NO: 2211 - DNA, 22 bp, Homo sapiens
cagcctcgtacctagccgtatt

SEQ ID NO: 2212 - DNA, 18 bp, Homo sapiens
cagcctcgtactagccga

SEQ ID NO: 2213 - DNA, 17 bp, Homo sapiens
cagcctctactagctat

SEQ ID NO: 2214 - DNA, 17 bp, Homo sapiens
cagctcgtactagcctt

SEQ ID NO: 2215 - DNA, 27 bp, Homo sapiens
cagctctcggtgccggctgtggagagt

SEQ ID NO: 2216 - DNA, 17 bp, Homo sapiens
cagctcttccttgagag

SEQ ID NO: 2217 - DNA, 36 bp, Homo sapiens
cagcttggcgacccagctgttaagcagaacaaatca

SEQ ID NO: 2218 - DNA, 17 bp, Homo sapiens
caggagtactggtttga

SEQ ID NO: 2219 - DNA, 24 bp, Homo sapiens
caggcctcgtacctagccgtaagt

SEQ ID NO: 2220 - DNA, 17 bp, Homo sapiens
caggcctcgtactagcg

SEQ ID NO: 2221 - DNA, 17 bp, Homo sapiens
caggctcgctcttagac

SEQ ID NO: 2222 - DNA, 17 bp, Homo sapiens
caggctcgtacctagca

SEQ ID NO: 2223 - DNA, 18 bp, Homo sapiens
caggctcgtactagcgta

SEQ ID NO: 2224 - DNA, 20 bp, Homo sapiens
caggctcgtacttagacctt

SEQ ID NO: 2225 - DNA, 18 bp, Homo sapiens
caggctctgggaagtccg

SEQ ID NO: 2226 - DNA, 17 bp, Homo sapiens
caggctggagtgccaga

SEQ ID NO: 2227 - DNA, 18 bp, Homo sapiens
cagggcccgtttcgtatc

SEQ ID NO: 2228 - DNA, 17 bp, Homo sapiens
cagggccgtgggccagg

SEQ ID NO: 2229 - DNA, 18 bp, Homo sapiens
cagggcctcgtacctagc

SEQ ID NO: 2230 - DNA, 20 bp, Homo sapiens
cagggcctcgtacctagccg

SEQ ID NO: 2231 - DNA, 19 bp, Homo sapiens
cagggtgagccgaaggggg

SEQ ID NO: 2232 - DNA, 17 bp, Homo sapiens
cagggtgtacacctggt

SEQ ID NO: 2233 - DNA, 17 bp, Homo sapiens
caggtccgtcgatgatc

SEQ ID NO: 2234 - DNA, 17 bp, Homo sapiens
caggttaaggccaggac

SEQ ID NO: 2235 - DNA, 17 bp, Homo sapiens
caggttcagggtttgtg

SEQ ID NO: 2236 - DNA, 25 bp, Homo sapiens
cagtcatcgatacaccatcatgaca

SEQ ID NO: 2237 - DNA, 22 bp, Homo sapiens
cagtcgtgtgaatattggtgtc

SEQ ID NO: 2238 - DNA, 18 bp, Homo sapiens
cagtgaaatcctcgagca

SEQ ID NO: 2239 - DNA, 19 bp, Homo sapiens
cagtgactcagacggacag

SEQ ID NO: 2240 - DNA, 17 bp, Homo sapiens
cagtgccggtgatgggt

SEQ ID NO: 2241 - DNA, 20 bp, Homo sapiens
cagtgttagcacggctgacc

SEQ ID NO: 2242 - DNA, 19 bp, Homo sapiens
cagttctggataagcatct

SEQ ID NO: 2243 - DNA, 24 bp, Homo sapiens
cagttgatcttcctagtccaagtc

SEQ ID NO: 2244 - DNA, 17 bp, Homo sapiens
cagttttcaaacgccag

SEQ ID NO: 2245 - DNA, 17 bp, Homo sapiens
cagtttttctaaacgcc

SEQ ID NO: 2246 - DNA, 22 bp, Homo sapiens
cataccctcactcacacaggca

SEQ ID NO: 2247 - DNA, 19 bp, Homo sapiens
catccacgattgatggcat

SEQ ID NO: 2248 - DNA, 17 bp, Homo sapiens
catggaaggcccacatg

SEQ ID NO: 2249 - DNA, 17 bp, Homo sapiens
catggatgggagttgaa

SEQ ID NO: 2250 - DNA, 20 bp, Homo sapiens
cattaagagctcctaaagcc

SEQ ID NO: 2251 - DNA, 18 bp, Homo sapiens
cattcatgccaaagttca

SEQ ID NO: 2252 - DNA, 17 bp, Homo sapiens
cattcggggccattgtc

SEQ ID NO: 2253 - DNA, 21 bp, Homo sapiens
cattctttacatgccttcacc

SEQ ID NO: 2254 - DNA, 18 bp, Homo sapiens
cattgcatgcagtttgtt

SEQ ID NO: 2255 - DNA, 18 bp, Homo sapiens
cattggaagtactttgcg

SEQ ID NO: 2256 - DNA, 17 bp, Homo sapiens
cattggtttcccgatag

SEQ ID NO: 2257 - DNA, 18 bp, Homo sapiens
catttgacgattgtgtta

SEQ ID NO: 2258 - DNA, 17 bp, Homo sapiens
ccaacaagggggccaac

SEQ ID NO: 2259 - DNA, 23 bp, Homo sapiens
ccaacccagcctcgtacctagcc

SEQ ID NO: 2260 - DNA, 17 bp, Homo sapiens
ccaacccatcttttttt

SEQ ID NO: 2261 - DNA, 17 bp, Homo sapiens
ccaacccgctgcttccg

SEQ ID NO: 2262 - DNA, 17 bp, Homo sapiens
ccaagcctcgtactagc

SEQ ID NO: 2263 - DNA, 22 bp, Homo sapiens
ccaattggggaggataaattcc

SEQ ID NO: 2264 - DNA, 18 bp, Homo sapiens
ccaattgttcactatcat

SEQ ID NO: 2265 - DNA, 19 bp, Homo sapiens
ccaattgttcactatcatt

SEQ ID NO: 2266 - DNA, 29 bp, Homo sapiens
ccacacggagacgcaatgtactcgctgct

SEQ ID NO: 2267 - DNA, 17 bp, Homo sapiens
ccacaggcagcacagaa

SEQ ID NO: 2268 - DNA, 17 bp, Homo sapiens
ccacatcccccgccccc

SEQ ID NO: 2269 - DNA, 25 bp, Homo sapiens
ccacccagcctcgtacctagcctag

SEQ ID NO: 2270 - DNA, 20 bp, Homo sapiens
ccacccaggctcgcacctag

SEQ ID NO: 2271 - DNA, 24 bp, Homo sapiens
ccacccaggctcgctacttagacc

SEQ ID NO: 2272 - DNA, 17 bp, Homo sapiens
ccacccgcctcgctacc

SEQ ID NO: 2273 - DNA, 24 bp, Homo sapiens
ccacggccttggcataatcccaga

SEQ ID NO: 2274 - DNA, 17 bp, Homo sapiens
ccacggggaacttcgca

SEQ ID NO: 2275 - DNA, 17 bp, Homo sapiens
ccactatgggcccgagc

SEQ ID NO: 2276 - DNA, 17 bp, Homo sapiens
ccactcaggctcgctac

SEQ ID NO: 2277 - DNA, 41 bp, Homo sapiens
ccactgtggttcccggcttgggggcaagcgggggtttggcg

SEQ ID NO: 2278 - DNA, 17 bp, Homo sapiens
ccactttccagtcccaa

SEQ ID NO: 2279 - DNA, 18 bp, Homo sapiens
ccagaagccctgactctg

SEQ ID NO: 2280 - DNA, 17 bp, Homo sapiens
ccagactcgttggtacc

SEQ ID NO: 2281 - DNA, 18 bp, Homo sapiens
ccagagacccgttatgct

SEQ ID NO: 2282 - DNA, 19 bp, Homo sapiens
ccagatatgatggtcggat

SEQ ID NO: 2283 - DNA, 20 bp, Homo sapiens
ccagatatgatggtcggatc

SEQ ID NO: 2284 - DNA, 21 bp, Homo sapiens
ccagatatgatggtcggatct

SEQ ID NO: 2285 - DNA, 25 bp, Homo sapiens
ccagcacaccaacacctctgcggcc

SEQ ID NO: 2286 - DNA, 20 bp, Homo sapiens
ccagcaccctggcgcaggcc

SEQ ID NO: 2287 - DNA, 20 bp, Homo sapiens
ccagcactcgtacctagccg

SEQ ID NO: 2288 - DNA, 24 bp, Homo sapiens
ccagcctcgtacctagccgtaagc

SEQ ID NO: 2289 - DNA, 23 bp, Homo sapiens
ccagcctcgtacctagccgtatt

SEQ ID NO: 2290 - DNA, 21 bp, Homo sapiens
ccagcctcgtacctagcgtaa

SEQ ID NO: 2291 - DNA, 23 bp, Homo sapiens
ccagcctcgtactagcctaagtt

SEQ ID NO: 2292 - DNA, 19 bp, Homo sapiens
ccagcctcgtactagcgta

SEQ ID NO: 2293 - DNA, 18 bp, Homo sapiens
ccagcttccccatcacgt

SEQ ID NO: 2294 - DNA, 18 bp, Homo sapiens
ccagctttctgctgcatc

SEQ ID NO: 2295 - DNA, 22 bp, Homo sapiens
ccaggacgccggaagccggacg

SEQ ID NO: 2296 - DNA, 17 bp, Homo sapiens
ccaggcctcgtacctat

SEQ ID NO: 2297 - DNA, 21 bp, Homo sapiens
ccagggcctcgtacctagccg

SEQ ID NO: 2298 - DNA, 18 bp, Homo sapiens
ccaggtaacatagcgtaa

SEQ ID NO: 2299 - DNA, 17 bp, Homo sapiens
ccagtaaaggaaggatt

SEQ ID NO: 2300 - DNA, 18 bp, Homo sapiens
ccagtaagagccagggat

SEQ ID NO: 2301 - DNA, 17 bp, Homo sapiens
ccagtagcccgtgacag

SEQ ID NO: 2302 - DNA, 17 bp, Homo sapiens
ccagtctatcgatacca

SEQ ID NO: 2303 - DNA, 17 bp, Homo sapiens
ccagtctcgtactagcc

SEQ ID NO: 2304 - DNA, 20 bp, Homo sapiens
ccagtctgatatcagataca

SEQ ID NO: 2305 - DNA, 17 bp, Homo sapiens
ccagtgcatattcatcc

SEQ ID NO: 2306 - DNA, 17 bp, Homo sapiens
ccagtggccccctgggg

SEQ ID NO: 2307 - DNA, 17 bp, Homo sapiens
ccagttactgtgtctat

SEQ ID NO: 2308 - DNA, 17 bp, Homo sapiens
ccatataagccccatgt

SEQ ID NO: 2309 - DNA, 17 bp, Homo sapiens
ccatcccctggaaacca

SEQ ID NO: 2310 - DNA, 19 bp, Homo sapiens
ccatccgaaggatttcccc

SEQ ID NO: 2311 - DNA, 17 bp, Homo sapiens
ccatccgctgccagtca

SEQ ID NO: 2312 - DNA, 17 bp, Homo sapiens
ccatctcgagtgtattt

SEQ ID NO: 2313 - DNA, 23 bp, Homo sapiens
ccatgaggtcaatgatgggggcc

SEQ ID NO: 2314 - DNA, 26 bp, Homo sapiens
ccatgaggtcaatgatgggggccacc

SEQ ID NO: 2315 - DNA, 19 bp, Homo sapiens
ccatggaacaacttgaagg

SEQ ID NO: 2316 - DNA, 17 bp, Homo sapiens
ccatgggacagcccccc

SEQ ID NO: 2317 - DNA, 17 bp, Homo sapiens
ccatgggcacagtctca

SEQ ID NO: 2318 - DNA, 18 bp, Homo sapiens
ccatgtacgctagtaatg

SEQ ID NO: 2319 - DNA, 23 bp, Homo sapiens
ccatgtacgctagtaatgcagac

SEQ ID NO: 2320 - DNA, 21 bp, Homo sapiens
ccattaacaccattaaggtgt

SEQ ID NO: 2321 - DNA, 17 bp, Homo sapiens
cccaaacatccacctta

SEQ ID NO: 2322 - DNA, 17 bp, Homo sapiens
cccaaaggccagaggga

SEQ ID NO: 2323 - DNA, 17 bp, Homo sapiens
cccaaatttttgcccgg

SEQ ID NO: 2324 - DNA, 18 bp, Homo sapiens
cccaacagcatgcactgc

SEQ ID NO: 2325 - DNA, 17 bp, Homo sapiens
cccaatgttggtagaca

SEQ ID NO: 2326 - DNA, 17 bp, Homo sapiens
cccacaaccaccatgga

SEQ ID NO: 2327 - DNA, 17 bp, Homo sapiens
cccaccggtgtgaaccc

SEQ ID NO: 2328 - DNA, 20 bp, Homo sapiens
cccacgccgtccgcgacgcg

SEQ ID NO: 2329 - DNA, 17 bp, Homo sapiens
cccacgtccgctggcca

SEQ ID NO: 2330 - DNA, 17 bp, Homo sapiens
cccagattcatgcagcg

SEQ ID NO: 2331 - DNA, 19 bp, Homo sapiens
cccagcctcgtacctaacc

SEQ ID NO: 2332 - DNA, 20 bp, Homo sapiens
cccagcctcgtacctagcag

SEQ ID NO: 2333 - DNA, 25 bp, Homo sapiens
cccagcctcgtacctagcctaacgt

SEQ ID NO: 2334 - DNA, 17 bp, Homo sapiens
cccaggacagccatggc

SEQ ID NO: 2335 - DNA, 23 bp, Homo sapiens
cccaggcctcgtacctagcctta

SEQ ID NO: 2336 - DNA, 17 bp, Homo sapiens
cccagtcggacgcgtgg

SEQ ID NO: 2337 - DNA, 20 bp, Homo sapiens
cccatccgctgccagtcagt

SEQ ID NO: 2338 - DNA, 31 bp, Homo sapiens
cccatctgtctaaagcactccagtcccagag

SEQ ID NO: 2339 - DNA, 17 bp, Homo sapiens
cccatgaagcagggtgg

SEQ ID NO: 2340 - DNA, 20 bp, Homo sapiens
ccccaaatgtagccgagacg

SEQ ID NO: 2341 - DNA, 17 bp, Homo sapiens
ccccaaggcaatgtccc

SEQ ID NO: 2342 - DNA, 17 bp, Homo sapiens
ccccaaggggtttccgc

SEQ ID NO: 2343 - DNA, 18 bp, Homo sapiens
ccccaggcaaggttgccc

SEQ ID NO: 2344 - DNA, 19 bp, Homo sapiens
ccccagggaaagagctttc

SEQ ID NO: 2345 - DNA, 20 bp, Homo sapiens
ccccattgttttgtggtaaa

SEQ ID NO: 2346 - DNA, 17 bp, Homo sapiens
ccccattttccaggccc

SEQ ID NO: 2347 - DNA, 17 bp, Homo sapiens
ccccattttcttggaaa

SEQ ID NO: 2348 - DNA, 18 bp, Homo sapiens
cccccactgataccaccc

SEQ ID NO: 2349 - DNA, 17 bp, Homo sapiens
cccccagacaagccagg

SEQ ID NO: 2350 - DNA, 18 bp, Homo sapiens
cccccataaccattctct

SEQ ID NO: 2351 - DNA, 18 bp, Homo sapiens
cccccattttgttagaca

SEQ ID NO: 2352 - DNA, 18 bp, Homo sapiens
ccccccatctagcgttaa

SEQ ID NO: 2353 - DNA, 39 bp, Homo sapiens
cccccccatgaacatggggaagagctcgaagacttcatc

SEQ ID NO: 2354 - DNA, 18 bp, Homo sapiens
ccccccgctcttttttcc

SEQ ID NO: 2355 - DNA, 17 bp, Homo sapiens
cccccgccgcgcggccg

SEQ ID NO: 2356 - DNA, 19 bp, Homo sapiens
cccccgcttctcccatgga

SEQ ID NO: 2357 - DNA, 17 bp, Homo sapiens
cccccggtgcccggcca

SEQ ID NO: 2358 - DNA, 17 bp, Homo sapiens
cccccggtgggttctcc

SEQ ID NO: 2359 - DNA, 17 bp, Homo sapiens
ccccgaatggccccgcc

SEQ ID NO: 2360 - DNA, 17 bp, Homo sapiens
ccccggccacggccgtc

SEQ ID NO: 2361 - DNA, 17 bp, Homo sapiens
ccccggcttgagtgtac

SEQ ID NO: 2362 - DNA, 17 bp, Homo sapiens
cccctctctctgtggtg

SEQ ID NO: 2363 - DNA, 18 bp, Homo sapiens
cccctgtgttgttgtgtg

SEQ ID NO: 2364 - DNA, 17 bp, Homo sapiens
ccccttagcaccccctt

SEQ ID NO: 2365 - DNA, 17 bp, Homo sapiens
ccccttaggccctttcc

SEQ ID NO: 2366 - DNA, 17 bp, Homo sapiens
cccgaatttccatttaa

SEQ ID NO: 2367 - DNA, 18 bp, Homo sapiens
cccgacactggttcacag

SEQ ID NO: 2368 - DNA, 17 bp, Homo sapiens
cccgacccttaccagaa

SEQ ID NO: 2369 - DNA, 17 bp, Homo sapiens
cccgatccacaccggag

SEQ ID NO: 2370 - DNA, 39 bp, Homo sapiens
cccgccgactgcaggggatccggaggcgattctgcgcgg

SEQ ID NO: 2371 - DNA, 43 bp, Homo sapiens
cccgccgactgcaggggatccggaggcgattctgcgcgggtgt

SEQ ID NO: 2372 - DNA, 21 bp, Homo sapiens
cccgcctcgtacctagccgta

SEQ ID NO: 2373 - DNA, 17 bp, Homo sapiens
cccgcctcgtcctagcc

SEQ ID NO: 2374 - DNA, 17 bp, Homo sapiens
cccgcggagaggaggcg

SEQ ID NO: 2375 - DNA, 17 bp, Homo sapiens
cccgggcctcgacctag

SEQ ID NO: 2376 - DNA, 17 bp, Homo sapiens
cccggggacttttttcc

SEQ ID NO: 2377 - DNA, 17 bp, Homo sapiens
cccgggggcccgggttt

SEQ ID NO: 2378 - DNA, 21 bp, Homo sapiens
ccctaagtaccagttgatcta

SEQ ID NO: 2379 - DNA, 19 bp, Homo sapiens
ccctacgaccgtggatagc

SEQ ID NO: 2380 - DNA, 17 bp, Homo sapiens
ccctaggttgtgtgtca

SEQ ID NO: 2381 - DNA, 18 bp, Homo sapiens
ccctataggaactgggaa

SEQ ID NO: 2382 - DNA, 19 bp, Homo sapiens
ccctccgctgaagttgcgt

SEQ ID NO: 2383 - DNA, 17 bp, Homo sapiens
ccctcgccgattaacac

SEQ ID NO: 2384 - DNA, 18 bp, Homo sapiens
ccctcgccgattcacccc

SEQ ID NO: 2385 - DNA, 17 bp, Homo sapiens
ccctcggacagggcacc

SEQ ID NO: 2386 - DNA, 18 bp, Homo sapiens
ccctcggccgataacacc

SEQ ID NO: 2387 - DNA, 20 bp, Homo sapiens
ccctcggccgattcgacacc

SEQ ID NO: 2388 - DNA, 18 bp, Homo sapiens
ccctcgtgccgattaaca

SEQ ID NO: 2389 - DNA, 17 bp, Homo sapiens
ccctctcattagagggg

SEQ ID NO: 2390 - DNA, 17 bp, Homo sapiens
ccctctgggatctcaca

SEQ ID NO: 2391 - DNA, 19 bp, Homo sapiens
ccctggagacattcttcag

SEQ ID NO: 2392 - DNA, 18 bp, Homo sapiens
ccctgtaagtcccaggct

SEQ ID NO: 2393 - DNA, 24 bp, Homo sapiens
cccttaaaatcgaagggcctctcg

SEQ ID NO: 2394 - DNA, 24 bp, Homo sapiens
cccttcgattttaaggggcgtctg

SEQ ID NO: 2395 - DNA, 17 bp, Homo sapiens
cccttgggccttccggg

SEQ ID NO: 2396 - DNA, 17 bp, Homo sapiens
ccctttgggttgggggt

SEQ ID NO: 2397 - DNA, 17 bp, Homo sapiens
ccctttttcagtggatg

SEQ ID NO: 2398 - DNA, 18 bp, Homo sapiens
ccgaatctgacccgcagc

SEQ ID NO: 2399 - DNA, 17 bp, Homo sapiens
ccgacgtggcgcagctc

SEQ ID NO: 2400 - DNA, 20 bp, Homo sapiens
ccgagcctcgtactagccta

SEQ ID NO: 2401 - DNA, 23 bp, Homo sapiens
ccgagggctggagcctgttccat

SEQ ID NO: 2402 - DNA, 18 bp, Homo sapiens
ccgattaccaccggcctc

SEQ ID NO: 2403 - DNA, 25 bp, Homo sapiens
ccgattcaccacccgcctcgtacta

SEQ ID NO: 2404 - DNA, 17 bp, Homo sapiens
ccgattcccaccagcct

SEQ ID NO: 2405 - DNA, 17 bp, Homo sapiens
ccgcacacaccacacca

SEQ ID NO: 2406 - DNA, 35 bp, Homo sapiens
ccgcacttaaagccggtcgtggagatgagtgtgcg

SEQ ID NO: 2407 - DNA, 17 bp, Homo sapiens
ccgcagcccctgtcacc

SEQ ID NO: 2408 - DNA, 17 bp, Homo sapiens
ccgcattccccctccaa

SEQ ID NO: 2409 - DNA, 20 bp, Homo sapiens
ccgcattgattgcagcccag

SEQ ID NO: 2410 - DNA, 19 bp, Homo sapiens
ccgctgccttgtgaacctg

SEQ ID NO: 2411 - DNA, 18 bp, Homo sapiens
ccgctgggctgagcccta

SEQ ID NO: 2412 - DNA, 19 bp, Homo sapiens
ccggaaaagccacccaggc

SEQ ID NO: 2413 - DNA, 17 bp, Homo sapiens
ccggagcgtgagttccg

SEQ ID NO: 2414 - DNA, 17 bp, Homo sapiens
ccggccgcccgaccgcc

SEQ ID NO: 2415 - DNA, 20 bp, Homo sapiens
ccggcctcgacctagcctat

SEQ ID NO: 2416 - DNA, 21 bp, Homo sapiens
ccgggagttgactgcttcgag

SEQ ID NO: 2417 - DNA, 17 bp, Homo sapiens
ccggggttgagacaccc

SEQ ID NO: 2418 - DNA, 18 bp, Homo sapiens
ccgggttaacccggggct

SEQ ID NO: 2419 - DNA, 17 bp, Homo sapiens
ccggtagcccacgggca

SEQ ID NO: 2420 - DNA, 23 bp, Homo sapiens
ccggtggatgatgacctccttgc

SEQ ID NO: 2421 - DNA, 18 bp, Homo sapiens
ccggttcgtcatggctcg

SEQ ID NO: 2422 - DNA, 17 bp, Homo sapiens
ccggttgtaaacgttgg

SEQ ID NO: 2423 - DNA, 24 bp, Homo sapiens
ccgtatcgtacacccgaagtagcc

SEQ ID NO: 2424 - DNA, 19 bp, Homo sapiens
ccgtccctggataaaggta

SEQ ID NO: 2425 - DNA, 17 bp, Homo sapiens
ccgtgaacccaaggcat

SEQ ID NO: 2426 - DNA, 17 bp, Homo sapiens
ccgtggttggtgaaagc

SEQ ID NO: 2427 - DNA, 17 bp, Homo sapiens
ccgttttgtttctcccc

SEQ ID NO: 2428 - DNA, 17 bp, Homo sapiens
cctaacggggacttcca

SEQ ID NO: 2429 - DNA, 17 bp, Homo sapiens
cctaactggccctcggg

SEQ ID NO: 2430 - DNA, 17 bp, Homo sapiens
cctaacttggcccccag

SEQ ID NO: 2431 - DNA, 17 bp, Homo sapiens
cctagccctccctctca

SEQ ID NO: 2432 - DNA, 17 bp, Homo sapiens
cctaggaagcaaagtga

SEQ ID NO: 2433 - DNA, 18 bp, Homo sapiens
cctcaatctgcggagacc

SEQ ID NO: 2434 - DNA, 19 bp, Homo sapiens
cctcactgttcccgtgcca

SEQ ID NO: 2435 - DNA, 18 bp, Homo sapiens
cctcataacattaaacag

SEQ ID NO: 2436 - DNA, 17 bp, Homo sapiens
cctcatccgttgagaga

SEQ ID NO: 2437 - DNA, 21 bp, Homo sapiens
cctcccctcccccttccttcc

SEQ ID NO: 2438 - DNA, 17 bp, Homo sapiens
cctccggaaggaactga

SEQ ID NO: 2439 - DNA, 24 bp, Homo sapiens
cctcctacgacctcgatagagttg

SEQ ID NO: 2440 - DNA, 20 bp, Homo sapiens
cctcggatggctacagtctg

SEQ ID NO: 2441 - DNA, 18 bp, Homo sapiens
cctcggccgatacacacc

SEQ ID NO: 2442 - DNA, 19 bp, Homo sapiens
cctcggccgatacacaccc

SEQ ID NO: 2443 - DNA, 24 bp, Homo sapiens
cctcggccgattaacacccggccc

SEQ ID NO: 2444 - DNA, 22 bp, Homo sapiens
cctcggccgattaaccgcggcc

SEQ ID NO: 2445 - DNA, 21 bp, Homo sapiens
cctcggccgattacacccagc

SEQ ID NO: 2446 - DNA, 20 bp, Homo sapiens
cctcggccgattaccccggc

SEQ ID NO: 2447 - DNA, 25 bp, Homo sapiens
cctcggccgattcaacacccagctc

SEQ ID NO: 2448 - DNA, 22 bp, Homo sapiens
cctcggccgattcacacgcggc

SEQ ID NO: 2449 - DNA, 21 bp, Homo sapiens
cctcggccgattcaccccagg

SEQ ID NO: 2450 - DNA, 30 bp, Homo sapiens
cctcggccgattcacccccagcctcgtacc

SEQ ID NO: 2451 - DNA, 20 bp, Homo sapiens
cctcggccgattcacccccc

SEQ ID NO: 2452 - DNA, 20 bp, Homo sapiens
cctcggccgattcaccccgc

SEQ ID NO: 2453 - DNA, 25 bp, Homo sapiens
cctcggccgattcaccccggcctcg

SEQ ID NO: 2454 - DNA, 20 bp, Homo sapiens
cctcggccgattcgacaccc

SEQ ID NO: 2455 - DNA, 19 bp, Homo sapiens
cctcggccgattctacacc

SEQ ID NO: 2456 - DNA, 19 bp, Homo sapiens
cctcggccgatttacaccg

SEQ ID NO: 2457 - DNA, 17 bp, Homo sapiens
cctcgtacctaagccta

SEQ ID NO: 2458 - DNA, 19 bp, Homo sapiens
cctcgtacctagccgtaac

SEQ ID NO: 2459 - DNA, 18 bp, Homo sapiens
cctcgtactagccttagt

SEQ ID NO: 2460 - DNA, 17 bp, Homo sapiens
cctcgtccgaattaaac

SEQ ID NO: 2461 - DNA, 18 bp, Homo sapiens
cctcgtccgaattaacac

SEQ ID NO: 2462 - DNA, 17 bp, Homo sapiens
cctcgtccgatcacccc

SEQ ID NO: 2463 - DNA, 17 bp, Homo sapiens
cctcgtccgattaaacc

SEQ ID NO: 2464 - DNA, 17 bp, Homo sapiens
cctcgtccgattaaccg

SEQ ID NO: 2465 - DNA, 18 bp, Homo sapiens
cctcgtccgattaaccgc

SEQ ID NO: 2466 - DNA, 19 bp, Homo sapiens
cctcgtccgattacacacc

SEQ ID NO: 2467 - DNA, 21 bp, Homo sapiens
cctcgtccgattacccccggc

SEQ ID NO: 2468 - DNA, 21 bp, Homo sapiens
cctcgtccgattcacacccgc

SEQ ID NO: 2469 - DNA, 22 bp, Homo sapiens
cctcgtccgattcacacccggc

SEQ ID NO: 2470 - DNA, 23 bp, Homo sapiens
cctcgtccgattcaccccgcctc

SEQ ID NO: 2471 - DNA, 17 bp, Homo sapiens
cctcgtccgatttaacc

SEQ ID NO: 2472 - DNA, 19 bp, Homo sapiens
cctcgtccgatttacaccc

SEQ ID NO: 2473 - DNA, 17 bp, Homo sapiens
cctcgtccgatttaccc

SEQ ID NO: 2474 - DNA, 18 bp, Homo sapiens
cctcgtccgatttacccc

SEQ ID NO: 2475 - DNA, 19 bp, Homo sapiens
cctcgtccgatttaccccg

SEQ ID NO: 2476 - DNA, 22 bp, Homo sapiens
cctcgtctcggaaacgccaccc

SEQ ID NO: 2477 - DNA, 19 bp, Homo sapiens
cctcgtgcgaatcgccacc

SEQ ID NO: 2478 - DNA, 17 bp, Homo sapiens
cctcgtgttggaatgcc

SEQ ID NO: 2479 - DNA, 17 bp, Homo sapiens
cctctctgtccaggcag

SEQ ID NO: 2480 - DNA, 17 bp, Homo sapiens
cctcttttccgcccccg

SEQ ID NO: 2481 - DNA, 18 bp, Homo sapiens
cctgagcaaacctgagcg

SEQ ID NO: 2482 - DNA, 18 bp, Homo sapiens
cctgcgcggatacgcgac

SEQ ID NO: 2483 - DNA, 17 bp, Homo sapiens
cctggggcttcagcagc

SEQ ID NO: 2484 - DNA, 17 bp, Homo sapiens
cctgtctgttgtcaatc

SEQ ID NO: 2485 - DNA, 17 bp, Homo sapiens
cctgttccaggggggtt

SEQ ID NO: 2486 - DNA, 20 bp, Homo sapiens
ccttaaagatgatctagccc

SEQ ID NO: 2487 - DNA, 17 bp, Homo sapiens
ccttatcctcatataga

SEQ ID NO: 2488 - DNA, 17 bp, Homo sapiens
ccttcaaccgagcctga

SEQ ID NO: 2489 - DNA, 17 bp, Homo sapiens
ccttccaaacccagaaa

SEQ ID NO: 2490 - DNA, 19 bp, Homo sapiens
ccttcctgtgtcctggatc

SEQ ID NO: 2491 - DNA, 17 bp, Homo sapiens
ccttcgggacccccgga

SEQ ID NO: 2492 - DNA, 17 bp, Homo sapiens
ccttctcccgcgcgtcc

SEQ ID NO: 2493 - DNA, 17 bp, Homo sapiens
ccttctcgggagagaat

SEQ ID NO: 2494 - DNA, 17 bp, Homo sapiens
ccttcttcttttcgctc

SEQ ID NO: 2495 - DNA, 19 bp, Homo sapiens
cctttatagtagacatctg

SEQ ID NO: 2496 - DNA, 31 bp, Homo sapiens
cctttgcagcatgcatacatcatagtgaagc

SEQ ID NO: 2497 - DNA, 17 bp, Homo sapiens
cctttgcttcatcatca

SEQ ID NO: 2498 - DNA, 20 bp, Homo sapiens
cgaaatcgagactctcgttc

SEQ ID NO: 2499 - DNA, 22 bp, Homo sapiens
cgacagagggtcacatccagct

SEQ ID NO: 2500 - DNA, 18 bp, Homo sapiens
cgaccgcgttatttcact

SEQ ID NO: 2501 - DNA, 19 bp, Homo sapiens
cgacgcaaaagaagcctcg

SEQ ID NO: 2502 - DNA, 17 bp, Homo sapiens
cgacgcgtggctcgacc

SEQ ID NO: 2503 - DNA, 19 bp, Homo sapiens
cgacttgtctgagaatgca

SEQ ID NO: 2504 - DNA, 17 bp, Homo sapiens
cgagactctgttgggtc

SEQ ID NO: 2505 - DNA, 32 bp, Homo sapiens
cgagctccgcggagccgctgccatccgcccag

SEQ ID NO: 2506 - DNA, 22 bp, Homo sapiens
cgagggagcgctgctttcctga

SEQ ID NO: 2507 - DNA, 21 bp, Homo sapiens
cgagtactcaagcaccaacat

SEQ ID NO: 2508 - DNA, 23 bp, Homo sapiens
cgagtactcaagcaccaacatcg

SEQ ID NO: 2509 - DNA, 20 bp, Homo sapiens
cgatagtttcaacctggccc

SEQ ID NO: 2510 - DNA, 30 bp, Homo sapiens
cgatctttcccagtgtggcaggtagaccgc

SEQ ID NO: 2511 - DNA, 32 bp, Homo sapiens
cgatctttcccagtgtggcaggtagaccgctg

SEQ ID NO: 2512 - DNA, 18 bp, Homo sapiens
cgattaacacccggctcg

SEQ ID NO: 2513 - DNA, 18 bp, Homo sapiens
cgattcacacccagcccg

SEQ ID NO: 2514 - DNA, 17 bp, Homo sapiens
cgcacctagccgtagtt

SEQ ID NO: 2515 - DNA, 18 bp, Homo sapiens
cgcacgcgtgggtccgga

SEQ ID NO: 2516 - DNA, 18 bp, Homo sapiens
cgcatccagatacgtctg

SEQ ID NO: 2517 - DNA, 25 bp, Homo sapiens
cgccccatcgcgaagatccggagcg

SEQ ID NO: 2518 - DNA, 17 bp, Homo sapiens
cgccgcacaatgccccc

SEQ ID NO: 2519 - DNA, 18 bp, Homo sapiens
cgccgtgccgccgggggc

SEQ ID NO: 2520 - DNA, 18 bp, Homo sapiens
cgcctctgccgattcacc

SEQ ID NO: 2521 - DNA, 52 bp, Homo sapiens
cgcgcagtcgtgcgttagcctgcctcgcccgcgggctgaatcggcgcggagc

SEQ ID NO: 2522 - DNA, 17 bp, Homo sapiens
cgcggagtctcctcgga

SEQ ID NO: 2523 - DNA, 17 bp, Homo sapiens
cgcggcctcgtactagc

SEQ ID NO: 2524 - DNA, 19 bp, Homo sapiens
cgcggcctctactagccta

SEQ ID NO: 2525 - DNA, 17 bp, Homo sapiens
cgcgtgggtcagaccca

SEQ ID NO: 2526 - DNA, 18 bp, Homo sapiens
cgctcacgctctctcccc

SEQ ID NO: 2527 - DNA, 17 bp, Homo sapiens
cgctctcagacacactg

SEQ ID NO: 2528 - DNA, 17 bp, Homo sapiens
cggagactttggtttgg

SEQ ID NO: 2529 - DNA, 17 bp, Homo sapiens
cggagagacccacacgg

SEQ ID NO: 2530 - DNA, 20 bp, Homo sapiens
cggaggcagctttctggcac

SEQ ID NO: 2531 - DNA, 17 bp, Homo sapiens
cggcagctgggaagcag

SEQ ID NO: 2532 - DNA, 17 bp, Homo sapiens
cggcatcatcatgcgcc

SEQ ID NO: 2533 - DNA, 17 bp, Homo sapiens
cggccaacaggaccggt

SEQ ID NO: 2534 - DNA, 21 bp, Homo sapiens
cggccgattcacacaccagcc

SEQ ID NO: 2535 - DNA, 17 bp, Homo sapiens
cggccgattcacccccc

SEQ ID NO: 2536 - DNA, 21 bp, Homo sapiens
cggccgatttacacccagcct

SEQ ID NO: 2537 - DNA, 17 bp, Homo sapiens
cggccgatttaccccgg

SEQ ID NO: 2538 - DNA, 18 bp, Homo sapiens
cggccgccgtgagcacag

SEQ ID NO: 2539 - DNA, 17 bp, Homo sapiens
cggcctccccaagatgt

SEQ ID NO: 2540 - DNA, 21 bp, Homo sapiens
cggcctcgtacctagcctatt

SEQ ID NO: 2541 - DNA, 20 bp, Homo sapiens
cggcctcgtacctagcctga

SEQ ID NO: 2542 - DNA, 17 bp, Homo sapiens
cggcgcgtgccccaggc

SEQ ID NO: 2543 - DNA, 17 bp, Homo sapiens
cggcggcacagctgcgg

SEQ ID NO: 2544 - DNA, 17 bp, Homo sapiens
cgggagaggcccacagc

SEQ ID NO: 2545 - DNA, 17 bp, Homo sapiens
cgggcggtctgcggtga

SEQ ID NO: 2546 - DNA, 18 bp, Homo sapiens
cggggaatcgatcatttc

SEQ ID NO: 2547 - DNA, 17 bp, Homo sapiens
cggggttaaatttcccg

SEQ ID NO: 2548 - DNA, 18 bp, Homo sapiens
cggtgcctcagcctctac

SEQ ID NO: 2549 - DNA, 17 bp, Homo sapiens
cggtgttaccggcaggc

SEQ ID NO: 2550 - DNA, 18 bp, Homo sapiens
cggtttcctcggcgcacc

SEQ ID NO: 2551 - DNA, 17 bp, Homo sapiens
cggttttttgcgccccc

SEQ ID NO: 2552 - DNA, 41 bp, Homo sapiens
cgtagacgccttcgatattgcttcttcggtttcatggtgtt

SEQ ID NO: 2553 - DNA, 17 bp, Homo sapiens
cgtccacagaaagctac

SEQ ID NO: 2554 - DNA, 17 bp, Homo sapiens
cgtccacgcactggaag

SEQ ID NO: 2555 - DNA, 17 bp, Homo sapiens
cgtccgattcacccggc

SEQ ID NO: 2556 - DNA, 17 bp, Homo sapiens
cgtctcgttgtatcgcg

SEQ ID NO: 2557 - DNA, 20 bp, Homo sapiens
cgtgctgaatcgccacccag

SEQ ID NO: 2558 - DNA, 28 bp, Homo sapiens
cgtggacaactctttgagtacccaggtt

SEQ ID NO: 2559 - DNA, 17 bp, Homo sapiens
cgtgggtgccctggtgg

SEQ ID NO: 2560 - DNA, 17 bp, Homo sapiens
cgtgggtgtgtcgttgt

SEQ ID NO: 2561 - DNA, 17 bp, Homo sapiens
cgtggtcctcccggtag

SEQ ID NO: 2562 - DNA, 23 bp, Homo sapiens
cgtggtcgacgattcggagaatt

SEQ ID NO: 2563 - DNA, 20 bp, Homo sapiens
cgtggtcgccgatatcgcag

SEQ ID NO: 2564 - DNA, 18 bp, Homo sapiens
cgtgttgtctgacagcgg

SEQ ID NO: 2565 - DNA, 17 bp, Homo sapiens
cgtgtttcttctctctc

SEQ ID NO: 2566 - DNA, 17 bp, Homo sapiens
cgttctccgaccagctc

SEQ ID NO: 2567 - DNA, 17 bp, Homo sapiens
cgttgtgtgttgcccca

SEQ ID NO: 2568 - DNA, 22 bp, Homo sapiens
ctaaagcactccagtcccagag

SEQ ID NO: 2569 - DNA, 17 bp, Homo sapiens
ctaagaagtagaagctc

SEQ ID NO: 2570 - DNA, 20 bp, Homo sapiens
ctaaggtcgccacatctttc

SEQ ID NO: 2571 - DNA, 25 bp, Homo sapiens
ctaatacccaaataaggatgagcag

SEQ ID NO: 2572 - DNA, 18 bp, Homo sapiens
ctaatgagcgattgagtt

SEQ ID NO: 2573 - DNA, 17 bp, Homo sapiens
ctaatttccaaaaacct

SEQ ID NO: 2574 - DNA, 19 bp, Homo sapiens
ctaatttccaaaaacctac

SEQ ID NO: 2575 - DNA, 26 bp, Homo sapiens
ctacgaggccaccatccagcggcact

SEQ ID NO: 2576 - DNA, 19 bp, Homo sapiens
ctacgtccatccgatgacc

SEQ ID NO: 2577 - DNA, 20 bp, Homo sapiens
ctactgggcgccggctttgg

SEQ ID NO: 2578 - DNA, 35 bp, Homo sapiens
ctactgggcgccggctttgggagagtccgggcaag

SEQ ID NO: 2579 - DNA, 17 bp, Homo sapiens
ctactgtccggtcccag

SEQ ID NO: 2580 - DNA, 17 bp, Homo sapiens
ctagccatgggaggaac

SEQ ID NO: 2581 - DNA, 17 bp, Homo sapiens
ctcacaaggggaaaccc

SEQ ID NO: 2582 - DNA, 17 bp, Homo sapiens
ctcagacatcctctccc

SEQ ID NO: 2583 - DNA, 17 bp, Homo sapiens
ctcatctttcttcaccg

SEQ ID NO: 2584 - DNA, 20 bp, Homo sapiens
ctcatttttcataacacggg

SEQ ID NO: 2585 - DNA, 25 bp, Homo sapiens
ctccaaatgagtccatacccatctt

SEQ ID NO: 2586 - DNA, 27 bp, Homo sapiens
ctccaacacccagcctcgtacctagcc

SEQ ID NO: 2587 - DNA, 18 bp, Homo sapiens
ctccagagttcgggtcag

SEQ ID NO: 2588 - DNA, 39 bp, Homo sapiens
ctccagcttggcgacccagctgttaagcagaacaaatca

SEQ ID NO: 2589 - DNA, 27 bp, Homo sapiens
ctccccacgcaggggtaacaagatacg

SEQ ID NO: 2590 - DNA, 30 bp, Homo sapiens
ctcccggcagtctaacgccagaccaccgcc

SEQ ID NO: 2591 - DNA, 17 bp, Homo sapiens
ctccgatgggctctcgc

SEQ ID NO: 2592 - DNA, 21 bp, Homo sapiens
ctccgccacccggacatagga

SEQ ID NO: 2593 - DNA, 25 bp, Homo sapiens
ctccttaacggaaaggtgaggaccc

SEQ ID NO: 2594 - DNA, 25 bp, Homo sapiens
ctcgacacccagcctcgtacctagc

SEQ ID NO: 2595 - DNA, 19 bp, Homo sapiens
ctcgacggcgcgccggttg

SEQ ID NO: 2596 - DNA, 17 bp, Homo sapiens
ctcgcacctagccgatg

SEQ ID NO: 2597 - DNA, 17 bp, Homo sapiens
ctcgctgcgacgcaaaa

SEQ ID NO: 2598 - DNA, 17 bp, Homo sapiens
ctcggacccggccgctc

SEQ ID NO: 2599 - DNA, 18 bp, Homo sapiens
ctcggccgataacacccg

SEQ ID NO: 2600 - DNA, 17 bp, Homo sapiens
ctcggccgatacacacc

SEQ ID NO: 2601 - DNA, 23 bp, Homo sapiens
ctcggccgattaacacccggccc

SEQ ID NO: 2602 - DNA, 17 bp, Homo sapiens
ctcggccgattacaacc

SEQ ID NO: 2603 - DNA, 36 bp, Homo sapiens
ctcggccgattcaacacccggcctcgtacctagcct

SEQ ID NO: 2604 - DNA, 19 bp, Homo sapiens
ctcggccgattcaacccgg

SEQ ID NO: 2605 - DNA, 24 bp, Homo sapiens
ctcggccgattcacacccagcccg

SEQ ID NO: 2606 - DNA, 20 bp, Homo sapiens
ctcggccgattcacccggcc

SEQ ID NO: 2607 - DNA, 21 bp, Homo sapiens
ctcggccgatttacacccagg

SEQ ID NO: 2608 - DNA, 18 bp, Homo sapiens
ctcggccgatttacaccg

SEQ ID NO: 2609 - DNA, 19 bp, Homo sapiens
ctcggccgatttcaacccc

SEQ ID NO: 2610 - DNA, 18 bp, Homo sapiens
ctcgtacctagccgaagg

SEQ ID NO: 2611 - DNA, 21 bp, Homo sapiens
ctcgtacctagccgtatattt

SEQ ID NO: 2612 - DNA, 17 bp, Homo sapiens
ctcgtacctagcgtaat

SEQ ID NO: 2613 - DNA, 17 bp, Homo sapiens
ctcgtactagcctattt

SEQ ID NO: 2614 - DNA, 18 bp, Homo sapiens
ctcgtccgattcaccacg

SEQ ID NO: 2615 - DNA, 18 bp, Homo sapiens
ctcgtccgatttacaccc

SEQ ID NO: 2616 - DNA, 17 bp, Homo sapiens
ctcgtccgatttacccc

SEQ ID NO: 2617 - DNA, 18 bp, Homo sapiens
ctcgtccgatttaccccg

SEQ ID NO: 2618 - DNA, 17 bp, Homo sapiens
ctcgttttttctgttct

SEQ ID NO: 2619 - DNA, 17 bp, Homo sapiens
ctctctctctgctgcgt

SEQ ID NO: 2620 - DNA, 17 bp, Homo sapiens
ctcttcagatgccatca

SEQ ID NO: 2621 - DNA, 17 bp, Homo sapiens
ctctttaacatcagact

SEQ ID NO: 2622 - DNA, 19 bp, Homo sapiens
ctctttcaatagtcatatc

SEQ ID NO: 2623 - DNA, 32 bp, Homo sapiens
ctgaaattgctgcggtaggtgccgtaggcaaa

SEQ ID NO: 2624 - DNA, 23 bp, Homo sapiens
ctgacttgttgcgggaggcacgg

SEQ ID NO: 2625 - DNA, 17 bp, Homo sapiens
ctgagaggcagggctag

SEQ ID NO: 2626 - DNA, 17 bp, Homo sapiens
ctgagaggtcctcacgg

SEQ ID NO: 2627 - DNA, 17 bp, Homo sapiens
ctgaggccacagccccg

SEQ ID NO: 2628 - DNA, 17 bp, Homo sapiens
ctgcacggcgcaggcca

SEQ ID NO: 2629 - DNA, 18 bp, Homo sapiens
ctgcattgctcacatagt

SEQ ID NO: 2630 - DNA, 17 bp, Homo sapiens
ctgcccatcggcagctt

SEQ ID NO: 2631 - DNA, 18 bp, Homo sapiens
ctgcccctcggccgatta

SEQ ID NO: 2632 - DNA, 17 bp, Homo sapiens
ctgcctgaaccccaaag

SEQ ID NO: 2633 - DNA, 17 bp, Homo sapiens
ctgcctggacagagagg

SEQ ID NO: 2634 - DNA, 18 bp, Homo sapiens
ctgctcgggctttgaaca

SEQ ID NO: 2635 - DNA, 20 bp, Homo sapiens
ctgctttgtcgccgctggct

SEQ ID NO: 2636 - DNA, 17 bp, Homo sapiens
ctggaggtgccgtgtcc

SEQ ID NO: 2637 - DNA, 17 bp, Homo sapiens
ctggcgtgtcaagcaac

SEQ ID NO: 2638 - DNA, 42 bp, Homo sapiens
ctgggcttctgtgctgctcagctccttgctaagacggatggt

SEQ ID NO: 2639 - DNA, 17 bp, Homo sapiens
ctggggggggtccccag

SEQ ID NO: 2640 - DNA, 17 bp, Homo sapiens
ctggtgacgatcaccaa

SEQ ID NO: 2641 - DNA, 21 bp, Homo sapiens
ctgtaattcaccccaagtttc

SEQ ID NO: 2642 - DNA, 17 bp, Homo sapiens
ctgtcactccgacctgc

SEQ ID NO: 2643 - DNA, 17 bp, Homo sapiens
ctgtcccgagccagcat

SEQ ID NO: 2644 - DNA, 18 bp, Homo sapiens
ctgtcttcgggcggacgc

SEQ ID NO: 2645 - DNA, 17 bp, Homo sapiens
ctgtgatccggccccca

SEQ ID NO: 2646 - DNA, 17 bp, Homo sapiens
ctgtggaaccgttgcta

SEQ ID NO: 2647 - DNA, 17 bp, Homo sapiens
ctgtggctcgataagtg

SEQ ID NO: 2648 - DNA, 17 bp, Homo sapiens
ctgtggctgggaaagaa

SEQ ID NO: 2649 - DNA, 17 bp, Homo sapiens
ctgtgtccggtctgtgt

SEQ ID NO: 2650 - DNA, 17 bp, Homo sapiens
ctgttatttgtggtctt

SEQ ID NO: 2651 - DNA, 17 bp, Homo sapiens
ctgttcacatcccggct

SEQ ID NO: 2652 - DNA, 18 bp, Homo sapiens
ctgttcatcatcgtttgt

SEQ ID NO: 2653 - DNA, 31 bp, Homo sapiens
ctgttgagagcatagagatagtctcgaatta

SEQ ID NO: 2654 - DNA, 17 bp, Homo sapiens
ctgttgcttgggtccgc

SEQ ID NO: 2655 - DNA, 17 bp, Homo sapiens
ctgttggcctccaccat

SEQ ID NO: 2656 - DNA, 17 bp, Homo sapiens
ctgtttgaaaccgccat

SEQ ID NO: 2657 - DNA, 17 bp, Homo sapiens
cttaggttctgaaccaa

SEQ ID NO: 2658 - DNA, 18 bp, Homo sapiens
cttcaagagtcggggtca

SEQ ID NO: 2659 - DNA, 17 bp, Homo sapiens
cttcattctcgcagccc

SEQ ID NO: 2660 - DNA, 17 bp, Homo sapiens
cttccagtccaaagcag

SEQ ID NO: 2661 - DNA, 19 bp, Homo sapiens
cttccgttcagttcaggga

SEQ ID NO: 2662 - DNA, 20 bp, Homo sapiens
cttctggagtcatcaaattg

SEQ ID NO: 2663 - DNA, 17 bp, Homo sapiens
cttcttcgccacagtgc

SEQ ID NO: 2664 - DNA, 17 bp, Homo sapiens
cttcttggttgtgccac

SEQ ID NO: 2665 - DNA, 18 bp, Homo sapiens
cttgaaccctaggcatgt

SEQ ID NO: 2666 - DNA, 18 bp, Homo sapiens
cttgaccatggaagcccc

SEQ ID NO: 2667 - DNA, 21 bp, Homo sapiens
cttgcagtcaaacaccgagcc

SEQ ID NO: 2668 - DNA, 17 bp, Homo sapiens
cttggggtgaggagggg

SEQ ID NO: 2669 - DNA, 18 bp, Homo sapiens
cttgtcatagagaaatgt

SEQ ID NO: 2670 - DNA, 17 bp, Homo sapiens
cttgtctgcttcaccca

SEQ ID NO: 2671 - DNA, 17 bp, Homo sapiens
ctttaaggccaccaggg

SEQ ID NO: 2672 - DNA, 17 bp, Homo sapiens
ctttattgagcatccgc

SEQ ID NO: 2673 - DNA, 17 bp, Homo sapiens
ctttccagttgacgatt

SEQ ID NO: 2674 - DNA, 18 bp, Homo sapiens
ctttgtatctccgtccgc

SEQ ID NO: 2675 - DNA, 20 bp, Homo sapiens
cttttagaaaagtatttttt

SEQ ID NO: 2676 - DNA, 19 bp, Homo sapiens
cttttctccaggggaggag

SEQ ID NO: 2677 - DNA, 17 bp, Homo sapiens
cttttttcttgttgtgc

SEQ ID NO: 2678 - DNA, 22 bp, Homo sapiens
gaaacgtaggccttctcagttt

SEQ ID NO: 2679 - DNA, 17 bp, Homo sapiens
gaaagataatatacatc

SEQ ID NO: 2680 - DNA, 21 bp, Homo sapiens
gaacccagcctcgtacctagc

SEQ ID NO: 2681 - DNA, 17 bp, Homo sapiens
gaactccttggggtggg

SEQ ID NO: 2682 - DNA, 18 bp, Homo sapiens
gaactgtattaatgcaaa

SEQ ID NO: 2683 - DNA, 17 bp, Homo sapiens
gaagagggtgctgggtc

SEQ ID NO: 2684 - DNA, 17 bp, Homo sapiens
gaaggagcgggggcccg

SEQ ID NO: 2685 - DNA, 17 bp, Homo sapiens
gaaggagtccaggaagt

SEQ ID NO: 2686 - DNA, 21 bp, Homo sapiens
gaagtcccggagcttggcaaa

SEQ ID NO: 2687 - DNA, 17 bp, Homo sapiens
gaagttccgtccatggt

SEQ ID NO: 2688 - DNA, 19 bp, Homo sapiens
gaatcccgacagtcctccg

SEQ ID NO: 2689 - DNA, 17 bp, Homo sapiens
gacaaagagaagaacag

SEQ ID NO: 2690 - DNA, 28 bp, Homo sapiens
gacaacctctgcttctctgtttcaaaca

SEQ ID NO: 2691 - DNA, 22 bp, Homo sapiens
gacagacacattcttcgacatt

SEQ ID NO: 2692 - DNA, 17 bp, Homo sapiens
gacagccacgctccttc

SEQ ID NO: 2693 - DNA, 20 bp, Homo sapiens
gacagcgcatgaggtactgt

SEQ ID NO: 2694 - DNA, 19 bp, Homo sapiens
gacagctaggtgctgcccc

SEQ ID NO: 2695 - DNA, 17 bp, Homo sapiens
gaccatggaaagccccc

SEQ ID NO: 2696 - DNA, 19 bp, Homo sapiens
gaccattcagtactcatct

SEQ ID NO: 2697 - DNA, 17 bp, Homo sapiens
gaccccccacgccggca

SEQ ID NO: 2698 - DNA, 19 bp, Homo sapiens
gaccctctcttccgtggtg

SEQ ID NO: 2699 - DNA, 17 bp, Homo sapiens
gacctgtgtggtgaccc

SEQ ID NO: 2700 - DNA, 18 bp, Homo sapiens
gaccttagcgcctggtgt

SEQ ID NO: 2701 - DNA, 25 bp, Homo sapiens
gaccttcatcttaaaatcggtttcc

SEQ ID NO: 2702 - DNA, 24 bp, Homo sapiens
gacgaggtagaattaataggactc

SEQ ID NO: 2703 - DNA, 18 bp, Homo sapiens
gactccccatctcgatcc

SEQ ID NO: 2704 - DNA, 17 bp, Homo sapiens
gactccgattcaatatc

SEQ ID NO: 2705 - DNA, 18 bp, Homo sapiens
gactctcggtttccaggt

SEQ ID NO: 2706 - DNA, 18 bp, Homo sapiens
gactgagaaccctgtgct

SEQ ID NO: 2707 - DNA, 17 bp, Homo sapiens
gagaaccgggggggaac

SEQ ID NO: 2708 - DNA, 17 bp, Homo sapiens
gagaatgtgatggtcac

SEQ ID NO: 2709 - DNA, 22 bp, Homo sapiens
gagacagcgcatgaggtactgt

SEQ ID NO: 2710 - DNA, 27 bp, Homo sapiens
gagacagcgcatgaggtactgtcctga

SEQ ID NO: 2711 - DNA, 21 bp, Homo sapiens
gagacccgtagctggcggctg

SEQ ID NO: 2712 - DNA, 17 bp, Homo sapiens
gagaggtggtgtctctc

SEQ ID NO: 2713 - DNA, 17 bp, Homo sapiens
gagatcgccactcaggc

SEQ ID NO: 2714 - DNA, 17 bp, Homo sapiens
gagcacaatgcagtttt

SEQ ID NO: 2715 - DNA, 18 bp, Homo sapiens
gagccccccatgatcccc

SEQ ID NO: 2716 - DNA, 17 bp, Homo sapiens
gagcctcgtacttagcc

SEQ ID NO: 2717 - DNA, 17 bp, Homo sapiens
gagcctctgccgattca

SEQ ID NO: 2718 - DNA, 17 bp, Homo sapiens
gagcgcaggtccagggc

SEQ ID NO: 2719 - DNA, 17 bp, Homo sapiens
gagctgttgctgttggt

SEQ ID NO: 2720 - DNA, 17 bp, Homo sapiens
gaggaagtgggtgttcg

SEQ ID NO: 2721 - DNA, 17 bp, Homo sapiens
gaggaccaccttatcag

SEQ ID NO: 2722 - DNA, 20 bp, Homo sapiens
gaggagaacatacggtccct

SEQ ID NO: 2723 - DNA, 17 bp, Homo sapiens
gaggagagcagaagcag

SEQ ID NO: 2724 - DNA, 18 bp, Homo sapiens
gaggcccacagctttcac

SEQ ID NO: 2725 - DNA, 17 bp, Homo sapiens
gaggcccccccttgaac

SEQ ID NO: 2726 - DNA, 17 bp, Homo sapiens
gaggccggcccaaggct

SEQ ID NO: 2727 - DNA, 23 bp, Homo sapiens
gagggaaagcggttttacgccaa

SEQ ID NO: 2728 - DNA, 17 bp, Homo sapiens
gaggtacttggcgctta

SEQ ID NO: 2729 - DNA, 17 bp, Homo sapiens
gaggtttcggaagcaaa

SEQ ID NO: 2730 - DNA, 18 bp, Homo sapiens
gagtactcaagcaccaac

SEQ ID NO: 2731 - DNA, 25 bp, Homo sapiens
gagtatataaccatcagcacagacc

SEQ ID NO: 2732 - DNA, 17 bp, Homo sapiens
gagtttctccccggggg

SEQ ID NO: 2733 - DNA, 17 bp, Homo sapiens
gataaaacactacagtc

SEQ ID NO: 2734 - DNA, 17 bp, Homo sapiens
gataccacgtgtcacgc

SEQ ID NO: 2735 - DNA, 17 bp, Homo sapiens
gatataggctgtgacta

SEQ ID NO: 2736 - DNA, 20 bp, Homo sapiens
gatcatcgcccactacctgg

SEQ ID NO: 2737 - DNA, 22 bp, Homo sapiens
gatccaggtttgagggctcaaa

SEQ ID NO: 2738 - DNA, 17 bp, Homo sapiens
gatcccatcactggccc

SEQ ID NO: 2739 - DNA, 17 bp, Homo sapiens
gatctggcccgctcatc

SEQ ID NO: 2740 - DNA, 17 bp, Homo sapiens
gatgacaagcttgcccg

SEQ ID NO: 2741 - DNA, 22 bp, Homo sapiens
gatgtcccgcgtgcttgaaagg

SEQ ID NO: 2742 - DNA, 18 bp, Homo sapiens
gatgtgcggaccacatat

SEQ ID NO: 2743 - DNA, 17 bp, Homo sapiens
gattaacacgagcctcg

SEQ ID NO: 2744 - DNA, 17 bp, Homo sapiens
gattatcccgtatgcga

SEQ ID NO: 2745 - DNA, 17 bp, Homo sapiens
gattcacacccagcccg

SEQ ID NO: 2746 - DNA, 18 bp, Homo sapiens
gattggtggtagaatgca

SEQ ID NO: 2747 - DNA, 18 bp, Homo sapiens
gatttcttcacctggcgc

SEQ ID NO: 2748 - DNA, 17 bp, Homo sapiens
gattttggttctggcag

SEQ ID NO: 2749 - DNA, 18 bp, Homo sapiens
gcaaaagtaactatcaac

SEQ ID NO: 2750 - DNA, 25 bp, Homo sapiens
gcaaccacccagcctcgtacctagc

SEQ ID NO: 2751 - DNA, 17 bp, Homo sapiens
gcaactcagctgagtac

SEQ ID NO: 2752 - DNA, 18 bp, Homo sapiens
gcaagtaggccctcggct

SEQ ID NO: 2753 - DNA, 17 bp, Homo sapiens
gcaagtccaggccttcg

SEQ ID NO: 2754 - DNA, 18 bp, Homo sapiens
gcaccacccggcctcgta

SEQ ID NO: 2755 - DNA, 18 bp, Homo sapiens
gcacccaccccaggggac

SEQ ID NO: 2756 - DNA, 20 bp, Homo sapiens
gcacccagcctcgtacctag

SEQ ID NO: 2757 - DNA, 23 bp, Homo sapiens
gcaccggtcgggtggcagcagag

SEQ ID NO: 2758 - DNA, 17 bp, Homo sapiens
gcacctttgtctttctg

SEQ ID NO: 2759 - DNA, 17 bp, Homo sapiens
gcacgcgtgggtccgga

SEQ ID NO: 2760 - DNA, 17 bp, Homo sapiens
gcagaaacaattaagtg

SEQ ID NO: 2761 - DNA, 18 bp, Homo sapiens
gcagcacgcacagcgcag

SEQ ID NO: 2762 - DNA, 17 bp, Homo sapiens
gcagccgcactgtatgc

SEQ ID NO: 2763 - DNA, 17 bp, Homo sapiens
gcatagatgccctcgag

SEQ ID NO: 2764 - DNA, 18 bp, Homo sapiens
gcatcaagtgcctgcgaa

SEQ ID NO: 2765 - DNA, 17 bp, Homo sapiens
gcatccaaccgaagcct

SEQ ID NO: 2766 - DNA, 17 bp, Homo sapiens
gcatcgacgcggcagcg

SEQ ID NO: 2767 - DNA, 26 bp, Homo sapiens
gccaagatcgggccgggacttctcac

SEQ ID NO: 2768 - DNA, 18 bp, Homo sapiens
gccacagctctgccaagt

SEQ ID NO: 2769 - DNA, 17 bp, Homo sapiens
gccactcaggctcgtac

SEQ ID NO: 2770 - DNA, 17 bp, Homo sapiens
gccatcctcccgccacg

SEQ ID NO: 2771 - DNA, 17 bp, Homo sapiens
gccatttctttttggcc

SEQ ID NO: 2772 - DNA, 17 bp, Homo sapiens
gcccagccttgcgcctt

SEQ ID NO: 2773 - DNA, 18 bp, Homo sapiens
gccccacatctaggcctt

SEQ ID NO: 2774 - DNA, 17 bp, Homo sapiens
gccccaccgccgtccgc

SEQ ID NO: 2775 - DNA, 19 bp, Homo sapiens
gccccgtgttgtcctcccg

SEQ ID NO: 2776 - DNA, 17 bp, Homo sapiens
gcccgaggcgtagctgt

SEQ ID NO: 2777 - DNA, 17 bp, Homo sapiens
gcccgccatggcgcccg

SEQ ID NO: 2778 - DNA, 17 bp, Homo sapiens
gcccgttccccgtggcc

SEQ ID NO: 2779 - DNA, 18 bp, Homo sapiens
gccctcctaccagggccc

SEQ ID NO: 2780 - DNA, 20 bp, Homo sapiens
gccctcggccgaattcacac

SEQ ID NO: 2781 - DNA, 17 bp, Homo sapiens
gccgattaaccccggct

SEQ ID NO: 2782 - DNA, 17 bp, Homo sapiens
gccgattcacccggcct

SEQ ID NO: 2783 - DNA, 18 bp, Homo sapiens
gccggcgcagcccctgcc

SEQ ID NO: 2784 - DNA, 17 bp, Homo sapiens
gccgggggtcccccggt

SEQ ID NO: 2785 - DNA, 35 bp, Homo sapiens
gccggtgctcctccaaggcggccagcgccgcgtac

SEQ ID NO: 2786 - DNA, 17 bp, Homo sapiens
gccggttctcgctctcc

SEQ ID NO: 2787 - DNA, 24 bp, Homo sapiens
gccggttctcgctctcccaggcct

SEQ ID NO: 2788 - DNA, 18 bp, Homo sapiens
gccgtccgcgacgcgtgg

SEQ ID NO: 2789 - DNA, 18 bp, Homo sapiens
gccgtcggccgctcgaac

SEQ ID NO: 2790 - DNA, 17 bp, Homo sapiens
gcctagttcttgcctga

SEQ ID NO: 2791 - DNA, 18 bp, Homo sapiens
gcctcccaatacagagcc

SEQ ID NO: 2792 - DNA, 17 bp, Homo sapiens
gcctcgctacctagcca

SEQ ID NO: 2793 - DNA, 17 bp, Homo sapiens
gcctcggccgatcacac

SEQ ID NO: 2794 - DNA, 18 bp, Homo sapiens
gcctcggccgatttaccc

SEQ ID NO: 2795 - DNA, 21 bp, Homo sapiens
gcctcgtacctagccgatagt

SEQ ID NO: 2796 - DNA, 23 bp, Homo sapiens
gcctcgtacctagccgtaaggtt

SEQ ID NO: 2797 - DNA, 22 bp, Homo sapiens
gcctcgtacctagccttagttt

SEQ ID NO: 2798 - DNA, 17 bp, Homo sapiens
gcctcgtactatgccta

SEQ ID NO: 2799 - DNA, 18 bp, Homo sapiens
gcctcgtccgatcacccc

SEQ ID NO: 2800 - DNA, 23 bp, Homo sapiens
gcctcgtcggaatcccacccagc

SEQ ID NO: 2801 - DNA, 17 bp, Homo sapiens
gcctcgttacctagcct

SEQ ID NO: 2802 - DNA, 17 bp, Homo sapiens
gcctggttcaccacttt

SEQ ID NO: 2803 - DNA, 29 bp, Homo sapiens
gcgagcccgagctcccgctccgaacctcc

SEQ ID NO: 2804 - DNA, 31 bp, Homo sapiens
gcgagcccgagctcccgctccgaacctcccg

SEQ ID NO: 2805 - DNA, 33 bp, Homo sapiens
gcgagcccgagctcccgctccgaacctcccgcg

SEQ ID NO: 2806 - DNA, 17 bp, Homo sapiens
gcgaggcgtagccctcg

SEQ ID NO: 2807 - DNA, 17 bp, Homo sapiens
gcgatttatgacccaaa

SEQ ID NO: 2808 - DNA, 17 bp, Homo sapiens
gcgcaggatccaggcgt

SEQ ID NO: 2809 - DNA, 28 bp, Homo sapiens
gcgcccaccactgggcccagggccgccc

SEQ ID NO: 2810 - DNA, 18 bp, Homo sapiens
gcgcgacgtagcacagct

SEQ ID NO: 2811 - DNA, 17 bp, Homo sapiens
gcgctctctctttcgct

SEQ ID NO: 2812 - DNA, 18 bp, Homo sapiens
gcgctctctttctggctg

SEQ ID NO: 2813 - DNA, 20 bp, Homo sapiens
gcgctgttatgcccccttcc

SEQ ID NO: 2814 - DNA, 17 bp, Homo sapiens
gcgcttctcttagttct

SEQ ID NO: 2815 - DNA, 20 bp, Homo sapiens
gcgcttgctcggctccaaca

SEQ ID NO: 2816 - DNA, 32 bp, Homo sapiens
gcgcttgctcggctccaacacagttcccagga

SEQ ID NO: 2817 - DNA, 19 bp, Homo sapiens
gcggctaagtggggatgtt

SEQ ID NO: 2818 - DNA, 17 bp, Homo sapiens
gcggctgcagcgcgtgt

SEQ ID NO: 2819 - DNA, 20 bp, Homo sapiens
gcgtaccagctacagagccg

SEQ ID NO: 2820 - DNA, 17 bp, Homo sapiens
gcgtgcctctcgccgtc

SEQ ID NO: 2821 - DNA, 18 bp, Homo sapiens
gcgtgcgggccgacacct

SEQ ID NO: 2822 - DNA, 23 bp, Homo sapiens
gcgtggcgggcctcgtagcaggc

SEQ ID NO: 2823 - DNA, 17 bp, Homo sapiens
gcgtgggtcgaccattc

SEQ ID NO: 2824 - DNA, 20 bp, Homo sapiens
gcgttaagtttatttagttg

SEQ ID NO: 2825 - DNA, 17 bp, Homo sapiens
gcgttccacagctgctg

SEQ ID NO: 2826 - DNA, 24 bp, Homo sapiens
gctagatgaagcctggaagactat

SEQ ID NO: 2827 - DNA, 29 bp, Homo sapiens
gctcaaacttgcccctcacacctgtgttg

SEQ ID NO: 2828 - DNA, 21 bp, Homo sapiens
gctcagcctcggccgattaac

SEQ ID NO: 2829 - DNA, 17 bp, Homo sapiens
gctcagtcgaggatctt

SEQ ID NO: 2830 - DNA, 17 bp, Homo sapiens
gctcccagaggtccgtg

SEQ ID NO: 2831 - DNA, 29 bp, Homo sapiens
gctcgccaacagctggcagctccatggcc

SEQ ID NO: 2832 - DNA, 17 bp, Homo sapiens
gctcgctacttagaccg

SEQ ID NO: 2833 - DNA, 17 bp, Homo sapiens
gctcgtacctagcctta

SEQ ID NO: 2834 - DNA, 17 bp, Homo sapiens
gctcgtggcacttgagg

SEQ ID NO: 2835 - DNA, 47 bp, Homo sapiens
gctctgagaaaaccagcaaggcctctccaagcgcaccgagcaggagg

SEQ ID NO: 2836 - DNA, 31 bp, Homo sapiens
gctgaaggcctggacatcggccttgtagcaa

SEQ ID NO: 2837 - DNA, 45 bp, Homo sapiens
gctgaaggcctggacatcggccttgtagcaaagctccggcagtgg

SEQ ID NO: 2838 - DNA, 17 bp, Homo sapiens
gctgcagcgtctgcaac

SEQ ID NO: 2839 - DNA, 17 bp, Homo sapiens
gctggagtgttaggagg

SEQ ID NO: 2840 - DNA, 18 bp, Homo sapiens
gctggcgtttttccagcg

SEQ ID NO: 2841 - DNA, 25 bp, Homo sapiens
gctgggaccttcgccggcaggaaat

SEQ ID NO: 2842 - DNA, 17 bp, Homo sapiens
gctgtctccaaagctat

SEQ ID NO: 2843 - DNA, 18 bp, Homo sapiens
gcttacccaagccacgcg

SEQ ID NO: 2844 - DNA, 17 bp, Homo sapiens
gcttcaccaggcctggt

SEQ ID NO: 2845 - DNA, 18 bp, Homo sapiens
gcttcccatgggggggtc

SEQ ID NO: 2846 - DNA, 17 bp, Homo sapiens
gcttcgggggacctcat

SEQ ID NO: 2847 - DNA, 17 bp, Homo sapiens
gcttgctggattcctcg

SEQ ID NO: 2848 - DNA, 18 bp, Homo sapiens
gcttgctggattcctcga

SEQ ID NO: 2849 - DNA, 34 bp, Homo sapiens
gcttggcgacccagctgttaagcagaacaaatca

SEQ ID NO: 2850 - DNA, 17 bp, Homo sapiens
gctttgcacatcccgga

SEQ ID NO: 2851 - DNA, 17 bp, Homo sapiens
ggaacaggcccctccgg

SEQ ID NO: 2852 - DNA, 17 bp, Homo sapiens
ggaactctggttggtct

SEQ ID NO: 2853 - DNA, 17 bp, Homo sapiens
ggaagcacgagctgcac

SEQ ID NO: 2854 - DNA, 17 bp, Homo sapiens
ggaagcattttccggtg

SEQ ID NO: 2855 - DNA, 18 bp, Homo sapiens
ggacactgggcatccagg

SEQ ID NO: 2856 - DNA, 19 bp, Homo sapiens
ggacatagagtttgaagtg

SEQ ID NO: 2857 - DNA, 26 bp, Homo sapiens
ggacgcctgacttgagcctcccgcca

SEQ ID NO: 2858 - DNA, 20 bp, Homo sapiens
ggagacggggagcatcacag

SEQ ID NO: 2859 - DNA, 21 bp, Homo sapiens
ggagagccaggcccaaggcct

SEQ ID NO: 2860 - DNA, 40 bp, Homo sapiens
ggaggtgtatcattagaggatacaggaacagttcgtggct

SEQ ID NO: 2861 - DNA, 18 bp, Homo sapiens
ggagttgaaaggtgttct

SEQ ID NO: 2862 - DNA, 17 bp, Homo sapiens
ggatctgctgaagagct

SEQ ID NO: 2863 - DNA, 17 bp, Homo sapiens
ggatgtcccacgttcac

SEQ ID NO: 2864 - DNA, 18 bp, Homo sapiens
ggatgtcccacgttcaca

SEQ ID NO: 2865 - DNA, 17 bp, Homo sapiens
ggatttccctttttcct

SEQ ID NO: 2866 - DNA, 17 bp, Homo sapiens
ggcaatggccaagaatg

SEQ ID NO: 2867 - DNA, 17 bp, Homo sapiens
ggcaccatgatgcgggc

SEQ ID NO: 2868 - DNA, 17 bp, Homo sapiens
ggcagcaggcggcctct

SEQ ID NO: 2869 - DNA, 17 bp, Homo sapiens
ggcagcctccccagcac

SEQ ID NO: 2870 - DNA, 19 bp, Homo sapiens
ggcagcgtgcacgtgcttg

SEQ ID NO: 2871 - DNA, 19 bp, Homo sapiens
ggcaggcagggctctaccc

SEQ ID NO: 2872 - DNA, 20 bp, Homo sapiens
ggcaggctctgggaagtccg

SEQ ID NO: 2873 - DNA, 26 bp, Homo sapiens
ggcagtcggcactgaggtccctccat

SEQ ID NO: 2874 - DNA, 19 bp, Homo sapiens
ggcagtctaacgccagacc

SEQ ID NO: 2875 - DNA, 17 bp, Homo sapiens
ggcatcgtacctagcct

SEQ ID NO: 2876 - DNA, 18 bp, Homo sapiens
ggcatgccaccttacggg

SEQ ID NO: 2877 - DNA, 17 bp, Homo sapiens
ggccagccaacccaagc

SEQ ID NO: 2878 - DNA, 18 bp, Homo sapiens
ggccaggatttttacccc

SEQ ID NO: 2879 - DNA, 17 bp, Homo sapiens
ggccaggggccacgcgc

SEQ ID NO: 2880 - DNA, 18 bp, Homo sapiens
ggcccccaagatccgtgt

SEQ ID NO: 2881 - DNA, 24 bp, Homo sapiens
ggccgattaacaccggcctcgacc

SEQ ID NO: 2882 - DNA, 24 bp, Homo sapiens
ggccgattcaacacccggcctcgt

SEQ ID NO: 2883 - DNA, 28 bp, Homo sapiens
ggccgattcaccaccagcctcgtaccta

SEQ ID NO: 2884 - DNA, 26 bp, Homo sapiens
ggccgattcaccacccgcctcgtact

SEQ ID NO: 2885 - DNA, 17 bp, Homo sapiens
ggccgattcaccccagg

SEQ ID NO: 2886 - DNA, 21 bp, Homo sapiens
ggccgattcaccccggcctcg

SEQ ID NO: 2887 - DNA, 17 bp, Homo sapiens
ggccgcgtctccttgga

SEQ ID NO: 2888 - DNA, 17 bp, Homo sapiens
ggcctaagaccaggcgg

SEQ ID NO: 2889 - DNA, 20 bp, Homo sapiens
ggcctcgctaccttagccgt

SEQ ID NO: 2890 - DNA, 22 bp, Homo sapiens
ggcctcgtacctagcctagttt

SEQ ID NO: 2891 - DNA, 23 bp, Homo sapiens
ggcctcgtacctagcctatagtt

SEQ ID NO: 2892 - DNA, 19 bp, Homo sapiens
ggccttttcgattaaattc

SEQ ID NO: 2893 - DNA, 17 bp, Homo sapiens
ggcgagattcggtgccc

SEQ ID NO: 2894 - DNA, 17 bp, Homo sapiens
ggcggcgcacacgcgcc

SEQ ID NO: 2895 - DNA, 18 bp, Homo sapiens
ggcgggaggggggggagg

SEQ ID NO: 2896 - DNA, 18 bp, Homo sapiens
ggcgggcagcttgcggtc

SEQ ID NO: 2897 - DNA, 17 bp, Homo sapiens
ggcggggccggtaaaca

SEQ ID NO: 2898 - DNA, 17 bp, Homo sapiens
ggcggtggccattttcc

SEQ ID NO: 2899 - DNA, 30 bp, Homo sapiens
ggcggtggtctggcgttagactgccgggag

SEQ ID NO: 2900 - DNA, 17 bp, Homo sapiens
ggcgtgggcagttcgac

SEQ ID NO: 2901 - DNA, 17 bp, Homo sapiens
ggcgtggggggggcgtt

SEQ ID NO: 2902 - DNA, 21 bp, Homo sapiens
ggctcaggctgttaggtgtcc

SEQ ID NO: 2903 - DNA, 26 bp, Homo sapiens
ggcttgggggcaagcgggggtttggc

SEQ ID NO: 2904 - DNA, 18 bp, Homo sapiens
ggctttgcttttgcggct

SEQ ID NO: 2905 - DNA, 17 bp, Homo sapiens
gggaaaatagcagggga

SEQ ID NO: 2906 - DNA, 17 bp, Homo sapiens
gggaacactggatctga

SEQ ID NO: 2907 - DNA, 17 bp, Homo sapiens
gggaacccaccagacca

SEQ ID NO: 2908 - DNA, 17 bp, Homo sapiens
gggaagccccttgccct

SEQ ID NO: 2909 - DNA, 17 bp, Homo sapiens
gggaagggggtaatccc

SEQ ID NO: 2910 - DNA, 51 bp, Homo sapiens
gggacacagaactgtggggtcccgggcagtaactcgagcccgcggaagaca

SEQ ID NO: 2911 - DNA, 20 bp, Homo sapiens
gggaccccaaggccaatttc

SEQ ID NO: 2912 - DNA, 17 bp, Homo sapiens
gggaccccctgccaagt

SEQ ID NO: 2913 - DNA, 17 bp, Homo sapiens
gggacctttgggccccc

SEQ ID NO: 2914 - DNA, 27 bp, Homo sapiens
gggacgtttgaagcgatgaggcccgct

SEQ ID NO: 2915 - DNA, 20 bp, Homo sapiens
gggagacccgaacgagagcg

SEQ ID NO: 2916 - DNA, 17 bp, Homo sapiens
gggagcaaaaatacaac

SEQ ID NO: 2917 - DNA, 17 bp, Homo sapiens
gggaggacttcggcggg

SEQ ID NO: 2918 - DNA, 17 bp, Homo sapiens
gggccaattccattccc

SEQ ID NO: 2919 - DNA, 17 bp, Homo sapiens
gggccatggggaaggat

SEQ ID NO: 2920 - DNA, 17 bp, Homo sapiens
gggccccacaggacaga

SEQ ID NO: 2921 - DNA, 19 bp, Homo sapiens
gggcccccccttcccttgg

SEQ ID NO: 2922 - DNA, 18 bp, Homo sapiens
gggcccccctcccccgga

SEQ ID NO: 2923 - DNA, 17 bp, Homo sapiens
gggccccctggcgctgg

SEQ ID NO: 2924 - DNA, 17 bp, Homo sapiens
gggccccggttgttttt

SEQ ID NO: 2925 - DNA, 17 bp, Homo sapiens
gggcccgttccagcaga

SEQ ID NO: 2926 - DNA, 17 bp, Homo sapiens
gggccctccggaccgcc

SEQ ID NO: 2927 - DNA, 17 bp, Homo sapiens
gggccggtccgggtttt

SEQ ID NO: 2928 - DNA, 21 bp, Homo sapiens
gggccgtgcctcggaggggtc

SEQ ID NO: 2929 - DNA, 18 bp, Homo sapiens
ggggaataataaaggggg

SEQ ID NO: 2930 - DNA, 17 bp, Homo sapiens
ggggagggtgcccctcc

SEQ ID NO: 2931 - DNA, 18 bp, Homo sapiens
ggggcagcgggacccgct

SEQ ID NO: 2932 - DNA, 17 bp, Homo sapiens
ggggcctcacaaggccc

SEQ ID NO: 2933 - DNA, 23 bp, Homo sapiens
ggggcgctgttatgcccccttcc

SEQ ID NO: 2934 - DNA, 32 bp, Homo sapiens
ggggctagggaacatggatctatgccagacag

SEQ ID NO: 2935 - DNA, 18 bp, Homo sapiens
gggggaaagagcgcgggg

SEQ ID NO: 2936 - DNA, 18 bp, Homo sapiens
gggggacccataaggagg

SEQ ID NO: 2937 - DNA, 18 bp, Homo sapiens
gggggacctgacatccca

SEQ ID NO: 2938 - DNA, 17 bp, Homo sapiens
ggggggcagggcccagc

SEQ ID NO: 2939 - DNA, 17 bp, Homo sapiens
gggggggctgaaagggg

SEQ ID NO: 2940 - DNA, 17 bp, Homo sapiens
ggggggtagcggggcct

SEQ ID NO: 2941 - DNA, 17 bp, Homo sapiens
ggggggtagggcccacc

SEQ ID NO: 2942 - DNA, 17 bp, Homo sapiens
ggggggttgttggtggt

SEQ ID NO: 2943 - DNA, 19 bp, Homo sapiens
ggggtggggtgtagggggg

SEQ ID NO: 2944 - DNA, 17 bp, Homo sapiens
ggggtggtccagggggc

SEQ ID NO: 2945 - DNA, 17 bp, Homo sapiens
ggggttgggtccccggg

SEQ ID NO: 2946 - DNA, 19 bp, Homo sapiens
gggtcaggtctccaacaga

SEQ ID NO: 2947 - DNA, 19 bp, Homo sapiens
gggtctcggtatctgactc

SEQ ID NO: 2948 - DNA, 17 bp, Homo sapiens
gggtgaaatttccccgg

SEQ ID NO: 2949 - DNA, 17 bp, Homo sapiens
gggttctcgggggcccg

SEQ ID NO: 2950 - DNA, 17 bp, Homo sapiens
gggttgggaccccctgg

SEQ ID NO: 2951 - DNA, 22 bp, Homo sapiens
ggtaattcaggcttatgatttt

SEQ ID NO: 2952 - DNA, 17 bp, Homo sapiens
ggtacctaacttggccc

SEQ ID NO: 2953 - DNA, 17 bp, Homo sapiens
ggtacgtaactggcccc

SEQ ID NO: 2954 - DNA, 19 bp, Homo sapiens
ggtactcagaaaggtcctt

SEQ ID NO: 2955 - DNA, 17 bp, Homo sapiens
ggtaggcctgggccaat

SEQ ID NO: 2956 - DNA, 18 bp, Homo sapiens
ggtcccgcacggttgagg

SEQ ID NO: 2957 - DNA, 18 bp, Homo sapiens
ggtccgtgatgcacgtcc

SEQ ID NO: 2958 - DNA, 18 bp, Homo sapiens
ggtcgcggggcctggtac

SEQ ID NO: 2959 - DNA, 17 bp, Homo sapiens
ggtctcacgcatggtac

SEQ ID NO: 2960 - DNA, 17 bp, Homo sapiens
ggtctgtgtgttggtgt

SEQ ID NO: 2961 - DNA, 27 bp, Homo sapiens
ggtgaaaggaggacagaaccccggaga

SEQ ID NO: 2962 - DNA, 17 bp, Homo sapiens
ggtgacaggggctgcgg

SEQ ID NO: 2963 - DNA, 17 bp, Homo sapiens
ggtgtgggtgtgttggt

SEQ ID NO: 2964 - DNA, 17 bp, Homo sapiens
ggtgttatatatatgtg

SEQ ID NO: 2965 - DNA, 18 bp, Homo sapiens
ggtgttggggctacagga

SEQ ID NO: 2966 - DNA, 17 bp, Homo sapiens
ggttaacctgggttttt

SEQ ID NO: 2967 - DNA, 20 bp, Homo sapiens
ggttacagaataaagtggac

SEQ ID NO: 2968 - DNA, 30 bp, Homo sapiens
ggttcccggcttgggggcaagcgggggttt

SEQ ID NO: 2969 - DNA, 17 bp, Homo sapiens
ggttggcccccaaccca

SEQ ID NO: 2970 - DNA, 19 bp, Homo sapiens
ggttggtaatttctttaga

SEQ ID NO: 2971 - DNA, 18 bp, Homo sapiens
ggtttacgagcattgtta

SEQ ID NO: 2972 - DNA, 17 bp, Homo sapiens
ggttttttccccagtcc

SEQ ID NO: 2973 - DNA, 17 bp, Homo sapiens
ggttttttggattttgg

SEQ ID NO: 2974 - DNA, 17 bp, Homo sapiens
gtaacgttgcctggagc

SEQ ID NO: 2975 - DNA, 17 bp, Homo sapiens
gtaactttcatcttagt

SEQ ID NO: 2976 - DNA, 17 bp, Homo sapiens
gtaagatcttcatgagt

SEQ ID NO: 2977 - DNA, 17 bp, Homo sapiens
gtacctttcgcccgcgc

SEQ ID NO: 2978 - DNA, 17 bp, Homo sapiens
gtagctctgaccgggcc

SEQ ID NO: 2979 - DNA, 17 bp, Homo sapiens
gtagtcccgcgatagca

SEQ ID NO: 2980 - DNA, 21 bp, Homo sapiens
gtataaagcttaaaattataa

SEQ ID NO: 2981 - DNA, 20 bp, Homo sapiens
gtatagccagcatgagcttt

SEQ ID NO: 2982 - DNA, 30 bp, Homo sapiens
gtatgtggtgagacctttttgattaggaaa

SEQ ID NO: 2983 - DNA, 21 bp, Homo sapiens
gtcaaagggttcaatattttc

SEQ ID NO: 2984 - DNA, 28 bp, Homo sapiens
gtcaaagggttcaatattttccacccgc

SEQ ID NO: 2985 - DNA, 17 bp, Homo sapiens
gtcaatgatgtgctcaa

SEQ ID NO: 2986 - DNA, 17 bp, Homo sapiens
gtcacacagccgggccc

SEQ ID NO: 2987 - DNA, 21 bp, Homo sapiens
gtcagcagccgtccttcgtca

SEQ ID NO: 2988 - DNA, 17 bp, Homo sapiens
gtcatttgttctctccc

SEQ ID NO: 2989 - DNA, 20 bp, Homo sapiens
gtccactttattctgtaacc

SEQ ID NO: 2990 - DNA, 18 bp, Homo sapiens
gtcccacaaacattctcc

SEQ ID NO: 2991 - DNA, 17 bp, Homo sapiens
gtccccaaagcacaggt

SEQ ID NO: 2992 - DNA, 18 bp, Homo sapiens
gtcccgcacggttgagga

SEQ ID NO: 2993 - DNA, 18 bp, Homo sapiens
gtcccgctgcacggaaga

SEQ ID NO: 2994 - DNA, 17 bp, Homo sapiens
gtccctggataaaggta

SEQ ID NO: 2995 - DNA, 17 bp, Homo sapiens
gtccgattaacacccag

SEQ ID NO: 2996 - DNA, 17 bp, Homo sapiens
gtcctctgccctatctg

SEQ ID NO: 2997 - DNA, 17 bp, Homo sapiens
gtccttctgccgacaca

SEQ ID NO: 2998 - DNA, 19 bp, Homo sapiens
gtcgcaccacagtaggagt

SEQ ID NO: 2999 - DNA, 19 bp, Homo sapiens
gtcgtcgtcgtcccgtcgg

SEQ ID NO: 3000 - DNA, 17 bp, Homo sapiens
gtcgtgtcaagtaagca

SEQ ID NO: 3001 - DNA, 31 bp, Homo sapiens
gtcgttactcccgggtcagtgccattgcggt

SEQ ID NO: 3002 - DNA, 21 bp, Homo sapiens
gtctcaagacaccactttgcc

SEQ ID NO: 3003 - DNA, 19 bp, Homo sapiens
gtctccaggtgtgctgtca

SEQ ID NO: 3004 - DNA, 17 bp, Homo sapiens
gtctcgggaggctcgcc

SEQ ID NO: 3005 - DNA, 17 bp, Homo sapiens
gtctgagccccagagtc

SEQ ID NO: 3006 - DNA, 17 bp, Homo sapiens
gtctggatggtgcctcc

SEQ ID NO: 3007 - DNA, 17 bp, Homo sapiens
gtcttagctgtgacagt

SEQ ID NO: 3008 - DNA, 17 bp, Homo sapiens
gtgaacctgctaccacc

SEQ ID NO: 3009 - DNA, 17 bp, Homo sapiens
gtgacttgtgcattctg

SEQ ID NO: 3010 - DNA, 17 bp, Homo sapiens
gtgagagagaggcccag

SEQ ID NO: 3011 - DNA, 17 bp, Homo sapiens
gtgatggcacaactatg

SEQ ID NO: 3012 - DNA, 38 bp, Homo sapiens
gtgcacccactgtaggcaagacagctaggtgctgcccc

SEQ ID NO: 3013 - DNA, 17 bp, Homo sapiens
gtgcccaacagcaaacc

SEQ ID NO: 3014 - DNA, 20 bp, Homo sapiens
gtgccgaaatagccacccag

SEQ ID NO: 3015 - DNA, 21 bp, Homo sapiens
gtgccgaagacgccacccagg

SEQ ID NO: 3016 - DNA, 20 bp, Homo sapiens
gtgcctcggccgattaaccc

SEQ ID NO: 3017 - DNA, 17 bp, Homo sapiens
gtgccttgtagactctg

SEQ ID NO: 3018 - DNA, 17 bp, Homo sapiens
gtgcgtgcgtgcaacga

SEQ ID NO: 3019 - DNA, 18 bp, Homo sapiens
gtgcttcagaggaattct

SEQ ID NO: 3020 - DNA, 22 bp, Homo sapiens
gtggatagatgaaacctacagg

SEQ ID NO: 3021 - DNA, 19 bp, Homo sapiens
gtggattccggtttggccc

SEQ ID NO: 3022 - DNA, 18 bp, Homo sapiens
gtggatttgattgttcag

SEQ ID NO: 3023 - DNA, 17 bp, Homo sapiens
gtggccgtacaattcat

SEQ ID NO: 3024 - DNA, 17 bp, Homo sapiens
gtggctctcatccgtgg

SEQ ID NO: 3025 - DNA, 17 bp, Homo sapiens
gtgggagtcacagatcc

SEQ ID NO: 3026 - DNA, 17 bp, Homo sapiens
gtggggagtgggcgggg

SEQ ID NO: 3027 - DNA, 17 bp, Homo sapiens
gtggggttccaacaccc

SEQ ID NO: 3028 - DNA, 19 bp, Homo sapiens
gtgggtcttgacggaggtg

SEQ ID NO: 3029 - DNA, 19 bp, Homo sapiens
gtggtagcagaagtttttg

SEQ ID NO: 3030 - DNA, 17 bp, Homo sapiens
gtggtcgcgatatccga

SEQ ID NO: 3031 - DNA, 17 bp, Homo sapiens
gtggtctcctccctctt

SEQ ID NO: 3032 - DNA, 20 bp, Homo sapiens
gtggttctatatcccccgat

SEQ ID NO: 3033 - DNA, 17 bp, Homo sapiens
gtgtacatccagcaaac

SEQ ID NO: 3034 - DNA, 17 bp, Homo sapiens
gtgtaccacactgggcc

SEQ ID NO: 3035 - DNA, 18 bp, Homo sapiens
gtgtatctcatcgtccat

SEQ ID NO: 3036 - DNA, 17 bp, Homo sapiens
gtgtcaccttgaattgt

SEQ ID NO: 3037 - DNA, 19 bp, Homo sapiens
gtgtctgttctctctttct

SEQ ID NO: 3038 - DNA, 17 bp, Homo sapiens
gtgtcttcgtctgtcgt

SEQ ID NO: 3039 - DNA, 17 bp, Homo sapiens
gtgtctttcctcgtgtc

SEQ ID NO: 3040 - DNA, 17 bp, Homo sapiens
gtgtgcccgttgtgtgt

SEQ ID NO: 3041 - DNA, 17 bp, Homo sapiens
gtgtgctgcttctacct

SEQ ID NO: 3042 - DNA, 17 bp, Homo sapiens
gtgttgtgtggcgggtg

SEQ ID NO: 3043 - DNA, 17 bp, Homo sapiens
gtgttttcgcccgcggg

SEQ ID NO: 3044 - DNA, 17 bp, Homo sapiens
gtgtttttcttatgaca

SEQ ID NO: 3045 - DNA, 17 bp, Homo sapiens
gttcatacgcctcatct

SEQ ID NO: 3046 - DNA, 17 bp, Homo sapiens
gttccggctgttgttga

SEQ ID NO: 3047 - DNA, 18 bp, Homo sapiens
gttctccgggggcttggc

SEQ ID NO: 3048 - DNA, 17 bp, Homo sapiens
gttcttccgaaccagct

SEQ ID NO: 3049 - DNA, 31 bp, Homo sapiens
gttcttccgactctcttcggctccagaaagc

SEQ ID NO: 3050 - DNA, 37 bp, Homo sapiens
gttgaacttatcttctctggctgtcctcaaggcccgg

SEQ ID NO: 3051 - DNA, 17 bp, Homo sapiens
gttgcagccaggagaga

SEQ ID NO: 3052 - DNA, 17 bp, Homo sapiens
gttgcttgacacgccag

SEQ ID NO: 3053 - DNA, 20 bp, Homo sapiens
gttgcttgacacgccagttg

SEQ ID NO: 3054 - DNA, 20 bp, Homo sapiens
gttggtggtcgcaggaggca

SEQ ID NO: 3055 - DNA, 18 bp, Homo sapiens
gttggtttctgttgttgt

SEQ ID NO: 3056 - DNA, 18 bp, Homo sapiens
gttgtgtgtgctgtggtg

SEQ ID NO: 3057 - DNA, 17 bp, Homo sapiens
gttgtgttccgttgtgt

SEQ ID NO: 3058 - DNA, 17 bp, Homo sapiens
gttgtgttgtgctcttc

SEQ ID NO: 3059 - DNA, 20 bp, Homo sapiens
gtttagacggcggatttggt

SEQ ID NO: 3060 - DNA, 17 bp, Homo sapiens
gtttattggggtttcat

SEQ ID NO: 3061 - DNA, 17 bp, Homo sapiens
gtttcctcccccccgtt

SEQ ID NO: 3062 - DNA, 19 bp, Homo sapiens
gtttgaagcgatgaggccc

SEQ ID NO: 3063 - DNA, 22 bp, Homo sapiens
gtttgaagcgatgaggcccgct

SEQ ID NO: 3064 - DNA, 17 bp, Homo sapiens
gtttgccatagattctt

SEQ ID NO: 3065 - DNA, 17 bp, Homo sapiens
gtttgccccccttctgc

SEQ ID NO: 3066 - DNA, 18 bp, Homo sapiens
gtttgggtctctgccaac

SEQ ID NO: 3067 - DNA, 17 bp, Homo sapiens
gtttgtgttcttctttt

SEQ ID NO: 3068 - DNA, 17 bp, Homo sapiens
gtttgttcttctctctg

SEQ ID NO: 3069 - DNA, 18 bp, Homo sapiens
gttttggtgctttttgtt

SEQ ID NO: 3070 - DNA, 20 bp, Homo sapiens
gtttttctaccgccagtcag

SEQ ID NO: 3071 - DNA, 20 bp, Homo sapiens
taaagtagacgccctgtaga

SEQ ID NO: 3072 - DNA, 19 bp, Homo sapiens
taacaagtcaacagatctg

SEQ ID NO: 3073 - DNA, 26 bp, Homo sapiens
taacaccagcctcgtacctagcctaa

SEQ ID NO: 3074 - DNA, 19 bp, Homo sapiens
taacaccaggcctctacta

SEQ ID NO: 3075 - DNA, 25 bp, Homo sapiens
taacacccagcctcgtactagccta

SEQ ID NO: 3076 - DNA, 22 bp, Homo sapiens
taaccaagccgttctgtaccat

SEQ ID NO: 3077 - DNA, 18 bp, Homo sapiens
taagatatgcagatgtag

SEQ ID NO: 3078 - DNA, 18 bp, Homo sapiens
taagccatccaactgctg

SEQ ID NO: 3079 - DNA, 17 bp, Homo sapiens
taagtccctcccccttt

SEQ ID NO: 3080 - DNA, 17 bp, Homo sapiens
taatatatccccccaca

SEQ ID NO: 3081 - DNA, 17 bp, Homo sapiens
taatgttacttcctctt

SEQ ID NO: 3082 - DNA, 19 bp, Homo sapiens
taattggctcaaactttcc

SEQ ID NO: 3083 - DNA, 17 bp, Homo sapiens
tacagttcttgcgggat

SEQ ID NO: 3084 - DNA, 18 bp, Homo sapiens
taccctcattatagatga

SEQ ID NO: 3085 - DNA, 17 bp, Homo sapiens
taccgcgctcggttgag

SEQ ID NO: 3086 - DNA, 17 bp, Homo sapiens
tacctagccttaagttt

SEQ ID NO: 3087 - DNA, 17 bp, Homo sapiens
tacgagtttggccccat

SEQ ID NO: 3088 - DNA, 18 bp, Homo sapiens
tacgtccatccgatgacc

SEQ ID NO: 3089 - DNA, 17 bp, Homo sapiens
tactagcccacgcgtcc

SEQ ID NO: 3090 - DNA, 19 bp, Homo sapiens
tactcatggtctgcatccc

SEQ ID NO: 3091 - DNA, 17 bp, Homo sapiens
tactcccgcctgcctgg

SEQ ID NO: 3092 - DNA, 17 bp, Homo sapiens
tactgtgtcggtttgta

SEQ ID NO: 3093 - DNA, 19 bp, Homo sapiens
tacttcttggaaggttgga

SEQ ID NO: 3094 - DNA, 18 bp, Homo sapiens
tagaaggagtactggttc

SEQ ID NO: 3095 - DNA, 17 bp, Homo sapiens
tagacagaaactcacag

SEQ ID NO: 3096 - DNA, 17 bp, Homo sapiens
tagagagagatatagag

SEQ ID NO: 3097 - DNA, 17 bp, Homo sapiens
tagcaattaatgtattg

SEQ ID NO: 3098 - DNA, 17 bp, Homo sapiens
tagccgcaggtcagtcc

SEQ ID NO: 3099 - DNA, 27 bp, Homo sapiens
taggaataacgagtgacacgtgcaaga

SEQ ID NO: 3100 - DNA, 24 bp, Homo sapiens
taggccctaagaacaagactaaca

SEQ ID NO: 3101 - DNA, 18 bp, Homo sapiens
taggggaattgctgaaat

SEQ ID NO: 3102 - DNA, 17 bp, Homo sapiens
taggggctcaacttaca

SEQ ID NO: 3103 - DNA, 17 bp, Homo sapiens
tagggtgggggttctgt

SEQ ID NO: 3104 - DNA, 17 bp, Homo sapiens
taggtcttaaaatgcat

SEQ ID NO: 3105 - DNA, 21 bp, Homo sapiens
taggtggccgggcccgagtgg

SEQ ID NO: 3106 - DNA, 17 bp, Homo sapiens
tatagagtatataggga

SEQ ID NO: 3107 - DNA, 17 bp, Homo sapiens
tatataaattggccagg

SEQ ID NO: 3108 - DNA, 17 bp, Homo sapiens
tatatcacagagcacca

SEQ ID NO: 3109 - DNA, 18 bp, Homo sapiens
tatattaatcctggactg

SEQ ID NO: 3110 - DNA, 20 bp, Homo sapiens
tatattgatgccagtaagcg

SEQ ID NO: 3111 - DNA, 17 bp, Homo sapiens
tatctccaatcaacggt

SEQ ID NO: 3112 - DNA, 21 bp, Homo sapiens
tatctccggttaaagcatatc

SEQ ID NO: 3113 - DNA, 19 bp, Homo sapiens
tatgggaattagccgagct

SEQ ID NO: 3114 - DNA, 20 bp, Homo sapiens
tattactgggaggtccatgt

SEQ ID NO: 3115 - DNA, 19 bp, Homo sapiens
tattggtccatagataaaa

SEQ ID NO: 3116 - DNA, 18 bp, Homo sapiens
tatttcgaccccgatgat

SEQ ID NO: 3117 - DNA, 18 bp, Homo sapiens
tatttttttcgtgtgctg

SEQ ID NO: 3118 - DNA, 17 bp, Homo sapiens
tcaaaaggaggggaggg

SEQ ID NO: 3119 - DNA, 18 bp, Homo sapiens
tcaaaatctgtcattttg

SEQ ID NO: 3120 - DNA, 18 bp, Homo sapiens
tcaacagcgggttccacg

SEQ ID NO: 3121 - DNA, 26 bp, Homo sapiens
tcaaccacccagcctcgtacctagcc

SEQ ID NO: 3122 - DNA, 20 bp, Homo sapiens
tcaagcagcttgtttccact

SEQ ID NO: 3123 - DNA, 21 bp, Homo sapiens
tcaaggagacaggtgaggagt

SEQ ID NO: 3124 - DNA, 17 bp, Homo sapiens
tcacagcactggacgca

SEQ ID NO: 3125 - DNA, 17 bp, Homo sapiens
tcacagtacgttcaaac

SEQ ID NO: 3126 - DNA, 27 bp, Homo sapiens
tcaccacccagcctcgtacctagccta

SEQ ID NO: 3127 - DNA, 23 bp, Homo sapiens
tcaccacccgcctcgtacctagc

SEQ ID NO: 3128 - DNA, 20 bp, Homo sapiens
tcaccacccggcctcgtacc

SEQ ID NO: 3129 - DNA, 17 bp, Homo sapiens
tcaccctcaggaggcag

SEQ ID NO: 3130 - DNA, 51 bp, Homo sapiens
tcaccgtggctgacccgccggtgctcctccaaggcggccagcgccgcgtac

SEQ ID NO: 3131 - DNA, 17 bp, Homo sapiens
tcacgagaactcgtttg

SEQ ID NO: 3132 - DNA, 18 bp, Homo sapiens
tcacgccatttggtgttt

SEQ ID NO: 3133 - DNA, 17 bp, Homo sapiens
tcactttgcttcctagg

SEQ ID NO: 3134 - DNA, 17 bp, Homo sapiens
tcagcagtgttctgggt

SEQ ID NO: 3135 - DNA, 19 bp, Homo sapiens
tcagccaggggcgacgtcg

SEQ ID NO: 3136 - DNA, 19 bp, Homo sapiens
tcagcccttgccaggcgag

SEQ ID NO: 3137 - DNA, 41 bp, Homo sapiens
tcaggacctccgcttgggttagtgcaacacaatggggcatg

SEQ ID NO: 3138 - DNA, 53 bp, Homo sapiens
tcaggacctccgcttgggttagtgcaacacaatggggcatgggaacgatggct

SEQ ID NO: 3139 - DNA, 18 bp, Homo sapiens
tcaggctcaaggacaagc

SEQ ID NO: 3140 - DNA, 18 bp, Homo sapiens
tcagtgcgctcctgtagc

SEQ ID NO: 3141 - DNA, 17 bp, Homo sapiens
tcatagtaacctggttg

SEQ ID NO: 3142 - DNA, 31 bp, Homo sapiens
tcatcagtaaggtcagatgctgtttgcacac

SEQ ID NO: 3143 - DNA, 17 bp, Homo sapiens
tcatgcttctgagcaag

SEQ ID NO: 3144 - DNA, 17 bp, Homo sapiens
tcattattggggcccgg

SEQ ID NO: 3145 - DNA, 26 bp, Homo sapiens
tccaacacccagcctcgtacctagcc

SEQ ID NO: 3146 - DNA, 24 bp, Homo sapiens
tccaccacccagcctcgtacctag

SEQ ID NO: 3147 - DNA, 26 bp, Homo sapiens
tccaccacccagcctcgtacctagcc

SEQ ID NO: 3148 - DNA, 17 bp, Homo sapiens
tccacgattcggcttga

SEQ ID NO: 3149 - DNA, 18 bp, Homo sapiens
tccactcgccgcactcct

SEQ ID NO: 3150 - DNA, 19 bp, Homo sapiens
tccactcgccgcactccta

SEQ ID NO: 3151 - DNA, 28 bp, Homo sapiens
tccagcacaccaacacctctgcggccgc

SEQ ID NO: 3152 - DNA, 17 bp, Homo sapiens
tccaggccttcaaccag

SEQ ID NO: 3153 - DNA, 18 bp, Homo sapiens
tccagggtgcatttcgac

SEQ ID NO: 3154 - DNA, 18 bp, Homo sapiens
tcccacgggtcaacccag

SEQ ID NO: 3155 - DNA, 17 bp, Homo sapiens
tcccaggaaaatggagc

SEQ ID NO: 3156 - DNA, 26 bp, Homo sapiens
tccccacgcaggggtaacaagatacg

SEQ ID NO: 3157 - DNA, 17 bp, Homo sapiens
tcccctttgcgccccgg

SEQ ID NO: 3158 - DNA, 18 bp, Homo sapiens
tccgccggctgccaagcc

SEQ ID NO: 3159 - DNA, 17 bp, Homo sapiens
tccgcgtccccgcttgt

SEQ ID NO: 3160 - DNA, 17 bp, Homo sapiens
tcctccatcgggtggcg

SEQ ID NO: 3161 - DNA, 18 bp, Homo sapiens
tcctcggtgccgattaac

SEQ ID NO: 3162 - DNA, 17 bp, Homo sapiens
tcctgctcgctgccttc

SEQ ID NO: 3163 - DNA, 17 bp, Homo sapiens
tcctggcgtagatgtac

SEQ ID NO: 3164 - DNA, 17 bp, Homo sapiens
tcctgttgctggtgtcc

SEQ ID NO: 3165 - DNA, 18 bp, Homo sapiens
tccttgtgcaccagcccc

SEQ ID NO: 3166 - DNA, 32 bp, Homo sapiens
tcctttgcagcatgcatacatcatagtgaagc

SEQ ID NO: 3167 - DNA, 17 bp, Homo sapiens
tcgaacacaagcaccca

SEQ ID NO: 3168 - DNA, 21 bp, Homo sapiens
tcgaacacggggtcgcggtca

SEQ ID NO: 3169 - DNA, 26 bp, Homo sapiens
tcgaacacggggtcgcggtcacggct

SEQ ID NO: 3170 - DNA, 18 bp, Homo sapiens
tcgacccggaccgctcat

SEQ ID NO: 3171 - DNA, 18 bp, Homo sapiens
tcgatgacaatgccactg

SEQ ID NO: 3172 - DNA, 17 bp, Homo sapiens
tcgcaagggcacttgat

SEQ ID NO: 3173 - DNA, 17 bp, Homo sapiens
tcgccctccgtccgtgc

SEQ ID NO: 3174 - DNA, 22 bp, Homo sapiens
tcgcctcgtcctgcccggtcct

SEQ ID NO: 3175 - DNA, 17 bp, Homo sapiens
tcggaaacgccacccag

SEQ ID NO: 3176 - DNA, 17 bp, Homo sapiens
tcggaaagcccactcat

SEQ ID NO: 3177 - DNA, 17 bp, Homo sapiens
tcggagggccgttacgt

SEQ ID NO: 3178 - DNA, 17 bp, Homo sapiens
tcggcattttcttcttc

SEQ ID NO: 3179 - DNA, 22 bp, Homo sapiens
tcggccgattaacacccaggcc

SEQ ID NO: 3180 - DNA, 27 bp, Homo sapiens
tcggccgattaacaccgagcctcgtac

SEQ ID NO: 3181 - DNA, 22 bp, Homo sapiens
tcggccgattaccacccagcct

SEQ ID NO: 3182 - DNA, 22 bp, Homo sapiens
tcggccgattaccacccgcctc

SEQ ID NO: 3183 - DNA, 19 bp, Homo sapiens
tcggccgattgacacccgg

SEQ ID NO: 3184 - DNA, 18 bp, Homo sapiens
tcggccgatttacccccg

SEQ ID NO: 3185 - DNA, 18 bp, Homo sapiens
tcggcgctcgggtgctgg

SEQ ID NO: 3186 - DNA, 18 bp, Homo sapiens
tcgggtcaagtactgtag

SEQ ID NO: 3187 - DNA, 17 bp, Homo sapiens
tcgggtcagggtccccg

SEQ ID NO: 3188 - DNA, 18 bp, Homo sapiens
tcggtgccgattcacccc

SEQ ID NO: 3189 - DNA, 18 bp, Homo sapiens
tcgtacctagcctaaggt

SEQ ID NO: 3190 - DNA, 17 bp, Homo sapiens
tcgtcaaagagcagagc

SEQ ID NO: 3191 - DNA, 17 bp, Homo sapiens
tcgtccccatgctttcc

SEQ ID NO: 3192 - DNA, 19 bp, Homo sapiens
tcgtccccatgctttccag

SEQ ID NO: 3193 - DNA, 18 bp, Homo sapiens
tcgtccgattaacccccg

SEQ ID NO: 3194 - DNA, 19 bp, Homo sapiens
tcgtccgattacccccggc

SEQ ID NO: 3195 - DNA, 17 bp, Homo sapiens
tcgtcttctcaaagccg

SEQ ID NO: 3196 - DNA, 18 bp, Homo sapiens
tcgtggccccgctgccac

SEQ ID NO: 3197 - DNA, 17 bp, Homo sapiens
tcgtgtgtcgtgtggtg

SEQ ID NO: 3198 - DNA, 18 bp, Homo sapiens
tcgtttctttttcttgtt

SEQ ID NO: 3199 - DNA, 17 bp, Homo sapiens
tctaagctgggcatggt

SEQ ID NO: 3200 - DNA, 17 bp, Homo sapiens
tctaataacctgtgatc

SEQ ID NO: 3201 - DNA, 19 bp, Homo sapiens
tctagaaccctgcttatag

SEQ ID NO: 3202 - DNA, 24 bp, Homo sapiens
tctagggcatagctctgactcagg

SEQ ID NO: 3203 - DNA, 19 bp, Homo sapiens
tctatatccccggatacat

SEQ ID NO: 3204 - DNA, 17 bp, Homo sapiens
tctcacacaacagagag

SEQ ID NO: 3205 - DNA, 23 bp, Homo sapiens
tctccccagggcagctcctcgct

SEQ ID NO: 3206 - DNA, 23 bp, Homo sapiens
tctcctcggtttcaagtgttgcg

SEQ ID NO: 3207 - DNA, 17 bp, Homo sapiens
tctctcgcgcctcgctc

SEQ ID NO: 3208 - DNA, 17 bp, Homo sapiens
tctctctctccacaccc

SEQ ID NO: 3209 - DNA, 17 bp, Homo sapiens
tctctcttgtcctgttt

SEQ ID NO: 3210 - DNA, 17 bp, Homo sapiens
tctctgttgtctgggtc

SEQ ID NO: 3211 - DNA, 18 bp, Homo sapiens
tctctttgtgtgcctctc

SEQ ID NO: 3212 - DNA, 17 bp, Homo sapiens
tctgcaagtccaggcct

SEQ ID NO: 3213 - DNA, 19 bp, Homo sapiens
tctgccaatgatcttggcg

SEQ ID NO: 3214 - DNA, 17 bp, Homo sapiens
tctggagttcgtcatgg

SEQ ID NO: 3215 - DNA, 17 bp, Homo sapiens
tctgggagatgccattg

SEQ ID NO: 3216 - DNA, 17 bp, Homo sapiens
tctgggctgtgtctgtg

SEQ ID NO: 3217 - DNA, 17 bp, Homo sapiens
tctgtccgtccctctct

SEQ ID NO: 3218 - DNA, 17 bp, Homo sapiens
tctgttggtctacgagg

SEQ ID NO: 3219 - DNA, 20 bp, Homo sapiens
tcttcctttcttcttctctt

SEQ ID NO: 3220 - DNA, 19 bp, Homo sapiens
tcttggacaggaaggagcc

SEQ ID NO: 3221 - DNA, 17 bp, Homo sapiens
tctttcttaggaaatgg

SEQ ID NO: 3222 - DNA, 17 bp, Homo sapiens
tctttgttggttgttgt

SEQ ID NO: 3223 - DNA, 17 bp, Homo sapiens
tcttttcaagtgtatgt

SEQ ID NO: 3224 - DNA, 17 bp, Homo sapiens
tgaaagattcataatca

SEQ ID NO: 3225 - DNA, 17 bp, Homo sapiens
tgaacgaggggggtcag

SEQ ID NO: 3226 - DNA, 18 bp, Homo sapiens
tgaagctagtttaacagg

SEQ ID NO: 3227 - DNA, 22 bp, Homo sapiens
tgaagtcccggagcttggcaaa

SEQ ID NO: 3228 - DNA, 17 bp, Homo sapiens
tgaccatgaatatctga

SEQ ID NO: 3229 - DNA, 17 bp, Homo sapiens
tgacgatttggtgtaga

SEQ ID NO: 3230 - DNA, 21 bp, Homo sapiens
tgactggtcgctgccactctc

SEQ ID NO: 3231 - DNA, 60 bp, Homo sapiens
tgactggtcgctgccactctccgtcttccggctatggtcctgggtctcggtatctgactc

SEQ ID NO: 3232 - DNA, 19 bp, Homo sapiens
tgactttgccatccgttga

SEQ ID NO: 3233 - DNA, 20 bp, Homo sapiens
tgagaacacaatgctccgtt

SEQ ID NO: 3234 - DNA, 17 bp, Homo sapiens
tgagacccagtacctgg

SEQ ID NO: 3235 - DNA, 18 bp, Homo sapiens
tgagacccagtacctggt

SEQ ID NO: 3236 - DNA, 20 bp, Homo sapiens
tgagagcatagagatagtct

SEQ ID NO: 3237 - DNA, 19 bp, Homo sapiens
tgagagctctaaatggcac

SEQ ID NO: 3238 - DNA, 19 bp, Homo sapiens
tgagattttcatgaggtat

SEQ ID NO: 3239 - DNA, 18 bp, Homo sapiens
tgagttgggcccagtacc

SEQ ID NO: 3240 - DNA, 17 bp, Homo sapiens
tgataaagttagccctg

SEQ ID NO: 3241 - DNA, 24 bp, Homo sapiens
tgataagtcctctgaatacaactc

SEQ ID NO: 3242 - DNA, 17 bp, Homo sapiens
tgatagatcagcatgat

SEQ ID NO: 3243 - DNA, 17 bp, Homo sapiens
tgatccgggtaggcacc

SEQ ID NO: 3244 - DNA, 17 bp, Homo sapiens
tgatctgctaaagcacg

SEQ ID NO: 3245 - DNA, 17 bp, Homo sapiens
tgatctgggcctgtgca

SEQ ID NO: 3246 - DNA, 17 bp, Homo sapiens
tgatgtcaagggtttca

SEQ ID NO: 3247 - DNA, 18 bp, Homo sapiens
tgatgtccgcacgttgag

SEQ ID NO: 3248 - DNA, 17 bp, Homo sapiens
tgattatgaatctttca

SEQ ID NO: 3249 - DNA, 17 bp, Homo sapiens
tgcaagttcctttgttg

SEQ ID NO: 3250 - DNA, 17 bp, Homo sapiens
tgcaccccacggggcaa

SEQ ID NO: 3251 - DNA, 17 bp, Homo sapiens
tgcaccgacctgggagg

SEQ ID NO: 3252 - DNA, 17 bp, Homo sapiens
tgcactgtatatgccac

SEQ ID NO: 3253 - DNA, 17 bp, Homo sapiens
tgcatgcactgcctgtg

SEQ ID NO: 3254 - DNA, 17 bp, Homo sapiens
tgccatcagagatgata

SEQ ID NO: 3255 - DNA, 20 bp, Homo sapiens
tgccatccgtgacgggtgac

SEQ ID NO: 3256 - DNA, 18 bp, Homo sapiens
tgccatcttacgggggac

SEQ ID NO: 3257 - DNA, 17 bp, Homo sapiens
tgcccacggggggcggg

SEQ ID NO: 3258 - DNA, 19 bp, Homo sapiens
tgccctcaaggactcgatg

SEQ ID NO: 3259 - DNA, 17 bp, Homo sapiens
tgccctcacacgagcca

SEQ ID NO: 3260 - DNA, 17 bp, Homo sapiens
tgccctcggccgattac

SEQ ID NO: 3261 - DNA, 17 bp, Homo sapiens
tgcctcctcctcgtcct

SEQ ID NO: 3262 - DNA, 17 bp, Homo sapiens
tgcctcgtccgattaca

SEQ ID NO: 3263 - DNA, 20 bp, Homo sapiens
tgccttccaatgacttggag

SEQ ID NO: 3264 - DNA, 17 bp, Homo sapiens
tgcgcaaagtttggtca

SEQ ID NO: 3265 - DNA, 19 bp, Homo sapiens
tgcgcaagtttggtcaacg

SEQ ID NO: 3266 - DNA, 17 bp, Homo sapiens
tgcgcggggctcccttg

SEQ ID NO: 3267 - DNA, 39 bp, Homo sapiens
tgcgcttactgttgagagcatagagatagtctcgaatta

SEQ ID NO: 3268 - DNA, 17 bp, Homo sapiens
tgcgggagggtcagcat

SEQ ID NO: 3269 - DNA, 17 bp, Homo sapiens
tgcggggctacctgaag

SEQ ID NO: 3270 - DNA, 18 bp, Homo sapiens
tgctatcgggcgtggggc

SEQ ID NO: 3271 - DNA, 17 bp, Homo sapiens
tgctcatacacctatcc

SEQ ID NO: 3272 - DNA, 21 bp, Homo sapiens
tgctgtcaagggggcgcagct

SEQ ID NO: 3273 - DNA, 17 bp, Homo sapiens
tgctgttgtttgcttct

SEQ ID NO: 3274 - DNA, 17 bp, Homo sapiens
tgcttgttgctctctct

SEQ ID NO: 3275 - DNA, 18 bp, Homo sapiens
tggacccggcgctccgtc

SEQ ID NO: 3276 - DNA, 34 bp, Homo sapiens
tggagactactctgttggcgccttcaagtcccta

SEQ ID NO: 3277 - DNA, 17 bp, Homo sapiens
tggaggcagctcagctc

SEQ ID NO: 3278 - DNA, 17 bp, Homo sapiens
tggatacgcgacggtgt

SEQ ID NO: 3279 - DNA, 17 bp, Homo sapiens
tggatagcctatgactg

SEQ ID NO: 3280 - DNA, 19 bp, Homo sapiens
tggatctcactggatgctc

SEQ ID NO: 3281 - DNA, 17 bp, Homo sapiens
tggatgctgcgctttgt

SEQ ID NO: 3282 - DNA, 20 bp, Homo sapiens
tggccatatgattggcagag

SEQ ID NO: 3283 - DNA, 17 bp, Homo sapiens
tggcccacctttttcct

SEQ ID NO: 3284 - DNA, 17 bp, Homo sapiens
tggcccgtgggaacccc

SEQ ID NO: 3285 - DNA, 17 bp, Homo sapiens
tggcgtcccggaaatag

SEQ ID NO: 3286 - DNA, 17 bp, Homo sapiens
tggctttgctctctcgg

SEQ ID NO: 3287 - DNA, 18 bp, Homo sapiens
tgggaccggaagccatcc

SEQ ID NO: 3288 - DNA, 17 bp, Homo sapiens
tgggagggaacccgagg

SEQ ID NO: 3289 - DNA, 50 bp, Homo sapiens
tgggcaagaaaaccagggagcctaaatacactcagtagtgtttctccaag

SEQ ID NO: 3290 - DNA, 20 bp, Homo sapiens
tgggcagagaagcattaaga

SEQ ID NO: 3291 - DNA, 17 bp, Homo sapiens
tgggcccattcttcttg

SEQ ID NO: 3292 - DNA, 17 bp, Homo sapiens
tgggcgtgcagcggagg

SEQ ID NO: 3293 - DNA, 17 bp, Homo sapiens
tggggctgtgggttgtg

SEQ ID NO: 3294 - DNA, 17 bp, Homo sapiens
tgggggccaaaagtgct

SEQ ID NO: 3295 - DNA, 17 bp, Homo sapiens
tggtacactaatagaaa

SEQ ID NO: 3296 - DNA, 19 bp, Homo sapiens
tggtagtctcgcacatttg

SEQ ID NO: 3297 - DNA, 18 bp, Homo sapiens
tggtcgacgatatcgcaa

SEQ ID NO: 3298 - DNA, 17 bp, Homo sapiens
tggtctcagaatttcca

SEQ ID NO: 3299 - DNA, 18 bp, Homo sapiens
tggtctcagaatttccac

SEQ ID NO: 3300 - DNA, 17 bp, Homo sapiens
tggtgctccacctggtg

SEQ ID NO: 3301 - DNA, 20 bp, Homo sapiens
tggtgctcgcctcgctggtg

SEQ ID NO: 3302 - DNA, 21 bp, Homo sapiens
tggtggaagggtgcagtcatc

SEQ ID NO: 3303 - DNA, 18 bp, Homo sapiens
tggtggacttgtcccgaa

SEQ ID NO: 3304 - DNA, 18 bp, Homo sapiens
tggtgggccgctgagagc

SEQ ID NO: 3305 - DNA, 18 bp, Homo sapiens
tggtgggcgtgggcggtg

SEQ ID NO: 3306 - DNA, 17 bp, Homo sapiens
tggtgtgggtccttgac

SEQ ID NO: 3307 - DNA, 17 bp, Homo sapiens
tggttcagttcaccata

SEQ ID NO: 3308 - DNA, 17 bp, Homo sapiens
tggttccctgcagttcc

SEQ ID NO: 3309 - DNA, 17 bp, Homo sapiens
tggttctcactcttgtc

SEQ ID NO: 3310 - DNA, 17 bp, Homo sapiens
tggttgatgttcagggt

SEQ ID NO: 3311 - DNA, 29 bp, Homo sapiens
tggttgctcatcagggcaactgggagacc

SEQ ID NO: 3312 - DNA, 17 bp, Homo sapiens
tgtaccttgccctggtc

SEQ ID NO: 3313 - DNA, 18 bp, Homo sapiens
tgtaggaagctccgcaag

SEQ ID NO: 3314 - DNA, 19 bp, Homo sapiens
tgtatgtattactccgagg

SEQ ID NO: 3315 - DNA, 17 bp, Homo sapiens
tgtcaattcggccccct

SEQ ID NO: 3316 - DNA, 17 bp, Homo sapiens
tgtcgctctcgttgtct

SEQ ID NO: 3317 - DNA, 18 bp, Homo sapiens
tgtctggggaatacctct

SEQ ID NO: 3318 - DNA, 39 bp, Homo sapiens
tgtggggtcccgggcagtaactcgagcccgcggaagaca

SEQ ID NO: 3319 - DNA, 43 bp, Homo sapiens
tgtggggtcccgggcagtaactcgagcccgcggaagacaggca

SEQ ID NO: 3320 - DNA, 19 bp, Homo sapiens
tgtggtgtggtgggtgctg

SEQ ID NO: 3321 - DNA, 18 bp, Homo sapiens
tgtgtgttctctctccgc

SEQ ID NO: 3322 - DNA, 17 bp, Homo sapiens
tgtgttctctctcgcgc

SEQ ID NO: 3323 - DNA, 17 bp, Homo sapiens
tgttaggaccagtccag

SEQ ID NO: 3324 - DNA, 17 bp, Homo sapiens
tgttgctgcagcatcac

SEQ ID NO: 3325 - DNA, 17 bp, Homo sapiens
tgttgggtttttgcccc

SEQ ID NO: 3326 - DNA, 17 bp, Homo sapiens
tgttgttgtgatgtgtt

SEQ ID NO: 3327 - DNA, 17 bp, Homo sapiens
tgttgttgttggtcgtc

SEQ ID NO: 3328 - DNA, 17 bp, Homo sapiens
tgttgttttgtgcctgt

SEQ ID NO: 3329 - DNA, 17 bp, Homo sapiens
tgtttaccggccccgcc

SEQ ID NO: 3330 - DNA, 17 bp, Homo sapiens
tgtttcatcagccaggc

SEQ ID NO: 3331 - DNA, 17 bp, Homo sapiens
tgtttcggtgacagtgg

SEQ ID NO: 3332 - DNA, 17 bp, Homo sapiens
tgtttgtctcttgtttg

SEQ ID NO: 3333 - DNA, 17 bp, Homo sapiens
tgtttgtgtgtataatg

SEQ ID NO: 3334 - DNA, 50 bp, Homo sapiens
ttaagctgcacggcactgctgttacatgtgaccctgagacctgctaactc

SEQ ID NO: 3335 - DNA, 17 bp, Homo sapiens
ttaatctggtgatgcct

SEQ ID NO: 3336 - DNA, 42 bp, Homo sapiens
ttacatagttcaagcatcatgtggacggggtatgctccaata

SEQ ID NO: 3337 - DNA, 20 bp, Homo sapiens
ttaccggctgtcatcctcct

SEQ ID NO: 3338 - DNA, 21 bp, Homo sapiens
ttaccggctgtcatcctcctc

SEQ ID NO: 3339 - DNA, 17 bp, Homo sapiens
ttacctgctctcaaatt

SEQ ID NO: 3340 - DNA, 18 bp, Homo sapiens
ttactgggaggtccatgt

SEQ ID NO: 3341 - DNA, 34 bp, Homo sapiens
ttactgttgagagcatagagatagtctcgaatta

SEQ ID NO: 3342 - DNA, 17 bp, Homo sapiens
ttagctgagactcatag

SEQ ID NO: 3343 - DNA, 17 bp, Homo sapiens
ttagttctgaattttta

SEQ ID NO: 3344 - DNA, 18 bp, Homo sapiens
ttatccaggggtagccag

SEQ ID NO: 3345 - DNA, 17 bp, Homo sapiens
ttatcctcggccgatta

SEQ ID NO: 3346 - DNA, 20 bp, Homo sapiens
ttatgcccataccaccaaga

SEQ ID NO: 3347 - DNA, 17 bp, Homo sapiens
ttatgccctcaagagaa

SEQ ID NO: 3348 - DNA, 53 bp, Homo sapiens
ttcagatcatatcgttggttcactcttacagaaggatcactttaaaatatctc

SEQ ID NO: 3349 - DNA, 17 bp, Homo sapiens
ttcagccagaggatgac

SEQ ID NO: 3350 - DNA, 18 bp, Homo sapiens
ttcaggagtaatgtcgac

SEQ ID NO: 3351 - DNA, 18 bp, Homo sapiens
ttcatgaccatcagatgc

SEQ ID NO: 3352 - DNA, 22 bp, Homo sapiens
ttccaaggaccggactccacct

SEQ ID NO: 3353 - DNA, 17 bp, Homo sapiens
ttccacgggcatgtcca

SEQ ID NO: 3354 - DNA, 17 bp, Homo sapiens
ttccataatggagttga

SEQ ID NO: 3355 - DNA, 17 bp, Homo sapiens
ttccatttggtcagagc

SEQ ID NO: 3356 - DNA, 21 bp, Homo sapiens
ttcccagcttcggttgcaccg

SEQ ID NO: 3357 - DNA, 18 bp, Homo sapiens
ttcccaggaaaatggagc

SEQ ID NO: 3358 - DNA, 27 bp, Homo sapiens
ttcccagtgtggcaggtagaccgctgt

SEQ ID NO: 3359 - DNA, 17 bp, Homo sapiens
ttcccatcatcagcagc

SEQ ID NO: 3360 - DNA, 18 bp, Homo sapiens
ttcccgggaaccttctct

SEQ ID NO: 3361 - DNA, 17 bp, Homo sapiens
ttccggaaaagcccttt

SEQ ID NO: 3362 - DNA, 18 bp, Homo sapiens
ttccgtcgatcatccaca

SEQ ID NO: 3363 - DNA, 18 bp, Homo sapiens
ttcctagggaccaacata

SEQ ID NO: 3364 - DNA, 24 bp, Homo sapiens
ttcgacagagggtcacatccagct

SEQ ID NO: 3365 - DNA, 17 bp, Homo sapiens
ttcgatggtgatcacgt

SEQ ID NO: 3366 - DNA, 26 bp, Homo sapiens
ttcgcctgccttgtccatatttctca

SEQ ID NO: 3367 - DNA, 17 bp, Homo sapiens
ttcggcgcagcgcctgc

SEQ ID NO: 3368 - DNA, 18 bp, Homo sapiens
ttcgtcccccattctcct

SEQ ID NO: 3369 - DNA, 18 bp, Homo sapiens
ttcgtgcagggttattcc

SEQ ID NO: 3370 - DNA, 17 bp, Homo sapiens
ttcgttatcaacgcagt

SEQ ID NO: 3371 - DNA, 18 bp, Homo sapiens
ttcgttgtaggcttcaga

SEQ ID NO: 3372 - DNA, 17 bp, Homo sapiens
ttctacccacaatctcc

SEQ ID NO: 3373 - DNA, 19 bp, Homo sapiens
ttctcaaccttctgtatct

SEQ ID NO: 3374 - DNA, 20 bp, Homo sapiens
ttctccagtaggacgatgtt

SEQ ID NO: 3375 - DNA, 18 bp, Homo sapiens
ttctctcctcccctcttt

SEQ ID NO: 3376 - DNA, 18 bp, Homo sapiens
ttctcttggctaactctt

SEQ ID NO: 3377 - DNA, 21 bp, Homo sapiens
ttctgatttgcctgacatgct

SEQ ID NO: 3378 - DNA, 35 bp, Homo sapiens
ttctgcatcccgccagtcccaatatggaatagtga

SEQ ID NO: 3379 - DNA, 17 bp, Homo sapiens
ttctggtaagggtcggg

SEQ ID NO: 3380 - DNA, 17 bp, Homo sapiens
ttctggtttgttgctgc

SEQ ID NO: 3381 - DNA, 17 bp, Homo sapiens
ttcttgatgggagtaga

SEQ ID NO: 3382 - DNA, 17 bp, Homo sapiens
ttgaaccacgtgtccac

SEQ ID NO: 3383 - DNA, 18 bp, Homo sapiens
ttgaccatggaagcccca

SEQ ID NO: 3384 - DNA, 17 bp, Homo sapiens
ttgacgattgtgtaaga

SEQ ID NO: 3385 - DNA, 17 bp, Homo sapiens
ttgagccctagagtttg

SEQ ID NO: 3386 - DNA, 17 bp, Homo sapiens
ttgagcttcccttcagc

SEQ ID NO: 3387 - DNA, 20 bp, Homo sapiens
ttgatccagcttgcccgtcc

SEQ ID NO: 3388 - DNA, 21 bp, Homo sapiens
ttgccatccgtgacgggtgac

SEQ ID NO: 3389 - DNA, 19 bp, Homo sapiens
ttgcccgtatggccgaaga

SEQ ID NO: 3390 - DNA, 21 bp, Homo sapiens
ttgcctgtgagacgcggcgct

SEQ ID NO: 3391 - DNA, 18 bp, Homo sapiens
ttgcggccaaagattaga

SEQ ID NO: 3392 - DNA, 17 bp, Homo sapiens
ttgctctgttccgtggt

SEQ ID NO: 3393 - DNA, 17 bp, Homo sapiens
ttgctgtttatgtgttg

SEQ ID NO: 3394 - DNA, 17 bp, Homo sapiens
ttggaatgccacccagg

SEQ ID NO: 3395 - DNA, 18 bp, Homo sapiens
ttggacgaattgttgtag

SEQ ID NO: 3396 - DNA, 18 bp, Homo sapiens
ttggagttgcctctatct

SEQ ID NO: 3397 - DNA, 17 bp, Homo sapiens
ttggatctcatcctcat

SEQ ID NO: 3398 - DNA, 17 bp, Homo sapiens
ttggccatggaagcccc

SEQ ID NO: 3399 - DNA, 17 bp, Homo sapiens
ttggccccgtttttccg

SEQ ID NO: 3400 - DNA, 18 bp, Homo sapiens
ttgggcccttgacaaaaa

SEQ ID NO: 3401 - DNA, 20 bp, Homo sapiens
ttgggggcaagcgggggttt

SEQ ID NO: 3402 - DNA, 21 bp, Homo sapiens
ttggtgcaaacacttcggcct

SEQ ID NO: 3403 - DNA, 21 bp, Homo sapiens
ttggttggtaatttctttaga

SEQ ID NO: 3404 - DNA, 17 bp, Homo sapiens
ttgtaaaaggaggttac

SEQ ID NO: 3405 - DNA, 17 bp, Homo sapiens
ttgtactcaaaatctta

SEQ ID NO: 3406 - DNA, 18 bp, Homo sapiens
ttgtatatgctgccattg

SEQ ID NO: 3407 - DNA, 17 bp, Homo sapiens
ttgtcaacagctcaaaa

SEQ ID NO: 3408 - DNA, 17 bp, Homo sapiens
ttgtcgctctctctctc

SEQ ID NO: 3409 - DNA, 17 bp, Homo sapiens
ttgtcgttgtctcgtcg

SEQ ID NO: 3410 - DNA, 18 bp, Homo sapiens
ttgtggtatttggggtgc

SEQ ID NO: 3411 - DNA, 18 bp, Homo sapiens
ttgtggtgtggtggttgt

SEQ ID NO: 3412 - DNA, 17 bp, Homo sapiens
ttgtgtggtgtggtagt

SEQ ID NO: 3413 - DNA, 18 bp, Homo sapiens
ttgtgttggtgtggtgtg

SEQ ID NO: 3414 - DNA, 18 bp, Homo sapiens
ttgttcttcttgttgttc

SEQ ID NO: 3415 - DNA, 17 bp, Homo sapiens
tttagcgcgataacatc

SEQ ID NO: 3416 - DNA, 18 bp, Homo sapiens
tttaggtttctgaacaaa

SEQ ID NO: 3417 - DNA, 17 bp, Homo sapiens
tttataaggtcttagag

SEQ ID NO: 3418 - DNA, 19 bp, Homo sapiens
tttcaatgcccactcgtcc

SEQ ID NO: 3419 - DNA, 21 bp, Homo sapiens
tttcaatgcccactcgtccta

SEQ ID NO: 3420 - DNA, 18 bp, Homo sapiens
tttcatgaagattgggtt

SEQ ID NO: 3421 - DNA, 17 bp, Homo sapiens
tttgcgtcgttgtctgt

SEQ ID NO: 3422 - DNA, 17 bp, Homo sapiens
tttggaacgccacccag

SEQ ID NO: 3423 - DNA, 18 bp, Homo sapiens
tttgggatcgccacccag

SEQ ID NO: 3424 - DNA, 18 bp, Homo sapiens
tttgggggccccgggaaa

SEQ ID NO: 3425 - DNA, 17 bp, Homo sapiens
tttgtaagcataggcat

SEQ ID NO: 3426 - DNA, 19 bp, Homo sapiens
tttgttgtctgttgttttt

SEQ ID NO: 3427 - DNA, 17 bp, Homo sapiens
tttgtttgtcagcttca

SEQ ID NO: 3428 - DNA, 18 bp, Homo sapiens
ttttaagattcccgagaa

SEQ ID NO: 3429 - DNA, 20 bp, Homo sapiens
ttttagtagctacctcatgg

SEQ ID NO: 3430 - DNA, 17 bp, Homo sapiens
ttttctggtcgaagatc

SEQ ID NO: 3431 - DNA, 17 bp, Homo sapiens
ttttggcgccccaatgg

SEQ ID NO: 3432 - DNA, 17 bp, Homo sapiens
ttttgtcttctcaaccc

SEQ ID NO: 3433 - DNA, 24 bp, Homo sapiens
tttttatagagttagggagtacag

SEQ ID NO: 3434 - DNA, 17 bp, Homo sapiens
tttttcttcgcgcgcgc

SEQ ID NO: 3435 - DNA, 17 bp, Homo sapiens
ttttttttgtttcgctt

SEQ ID NO: 3436 - DNA, 17 bp, Homo sapiens
aaaatcgccacccaggc

SEQ ID NO: 3437 - DNA, 17 bp, Homo sapiens
aaccccgtagtcctcct

SEQ ID NO: 3438 - DNA, 17 bp, Homo sapiens
aagggggttccttgggc

SEQ ID NO: 3439 - DNA, 17 bp, Homo sapiens
aagttaatttagttggg

SEQ ID NO: 3440 - DNA, 18 bp, Homo sapiens
acaccagcctcgtactag

SEQ ID NO: 3441 - DNA, 18 bp, Homo sapiens
acacccagcctcgtacta

SEQ ID NO: 3442 - DNA, 17 bp, Homo sapiens
acagaggccggagtgct

SEQ ID NO: 3443 - DNA, 17 bp, Homo sapiens
acatgcgggtactgagc

SEQ ID NO: 3444 - DNA, 17 bp, Homo sapiens
accacccagcctcgtac

SEQ ID NO: 3445 - DNA, 17 bp, Homo sapiens
accagcctcgtacctag

SEQ ID NO: 3446 - DNA, 19 bp, Homo sapiens
accagtgttcagtcaccat

SEQ ID NO: 3447 - DNA, 18 bp, Homo sapiens
acccagcctcgtacctta

SEQ ID NO: 3448 - DNA, 17 bp, Homo sapiens
acccagcctcgtactag

SEQ ID NO: 3449 - DNA, 16 bp, Homo sapiens
acccaggcctcgtacc

SEQ ID NO: 3450 - DNA, 17 bp, Homo sapiens
acccaggcctcgtacct

SEQ ID NO: 3451 - DNA, 16 bp, Homo sapiens
accccgctcgaaggcc

SEQ ID NO: 3452 - DNA, 16 bp, Homo sapiens
acccggcctcgtacct

SEQ ID NO: 3453 - DNA, 17 bp, Homo sapiens
accctcggccgattcaa

SEQ ID NO: 3454 - DNA, 17 bp, Homo sapiens
accggcctcgtactagc

SEQ ID NO: 3455 - DNA, 15 bp, Homo sapiens
acctgggcccccggc

SEQ ID NO: 3456 - DNA, 17 bp, Homo sapiens
agccccgcatacgtgga

SEQ ID NO: 3457 - DNA, 17 bp, Homo sapiens
agcctcgacctagccga

SEQ ID NO: 3458 - DNA, 16 bp, Homo sapiens
agcctcgcacctagcc

SEQ ID NO: 3459 - DNA, 17 bp, Homo sapiens
agcctcgcacctagcct

SEQ ID NO: 3460 - DNA, 17 bp, Homo sapiens
agcctcgctacctagcc

SEQ ID NO: 3461 - DNA, 17 bp, Homo sapiens
agcctcgtacctagacc

SEQ ID NO: 3462 - DNA, 17 bp, Homo sapiens
agcctcgtacctagcca

SEQ ID NO: 3463 - DNA, 17 bp, Homo sapiens
agcctcgtacctagccg

SEQ ID NO: 3464 - DNA, 17 bp, Homo sapiens
agcctcgtacctagcct

SEQ ID NO: 3465 - DNA, 18 bp, Homo sapiens
agcctcgtacctagcctt

SEQ ID NO: 3466 - DNA, 17 bp, Homo sapiens
agcgtccacctctgcag

SEQ ID NO: 3467 - DNA, 17 bp, Homo sapiens
agcgtgttccctggcat

SEQ ID NO: 3468 - DNA, 18 bp, Homo sapiens
aggacccaatctggctaa

SEQ ID NO: 3469 - DNA, 17 bp, Homo sapiens
aggcctcgtacctagcc

SEQ ID NO: 3470 - DNA, 16 bp, Homo sapiens
aggctccaccatgcgc

SEQ ID NO: 3471 - DNA, 17 bp, Homo sapiens
aggctcgctacctagac

SEQ ID NO: 3472 - DNA, 20 bp, Homo sapiens
aggtctcaatcagtattctc

SEQ ID NO: 3473 - DNA, 18 bp, Homo sapiens
aggttgcagaaggctgtg

SEQ ID NO: 3474 - DNA, 20 bp, Homo sapiens
agtgtaacaggagattaaca

SEQ ID NO: 3475 - DNA, 17 bp, Homo sapiens
agtttcttcaagatcac

SEQ ID NO: 3476 - DNA, 17 bp, Homo sapiens
atccgccgtgccatctc

SEQ ID NO: 3477 - DNA, 18 bp, Homo sapiens
attaacacccggcctcgt

SEQ ID NO: 3478 - DNA, 19 bp, Homo sapiens
attcaaacccagcctcgta

SEQ ID NO: 3479 - DNA, 18 bp, Homo sapiens
caaaccacggacaccatc

SEQ ID NO: 3480 - DNA, 17 bp, Homo sapiens
caccaggcctcgtacct

SEQ ID NO: 3481 - DNA, 16 bp, Homo sapiens
cacccagccctcgcta

SEQ ID NO: 3482 - DNA, 16 bp, Homo sapiens
cacccagcctcgcacc

SEQ ID NO: 3483 - DNA, 17 bp, Homo sapiens
cacccagcctcgtacct

SEQ ID NO: 3484 - DNA, 17 bp, Homo sapiens
cacgcagcctcgtacct

SEQ ID NO: 3485 - DNA, 16 bp, Homo sapiens
cacgggtcctgtggcg

SEQ ID NO: 3486 - DNA, 17 bp, Homo sapiens
cagcctcgtacctagac

SEQ ID NO: 3487 - DNA, 17 bp, Homo sapiens
cagcctcgtacctagcc

SEQ ID NO: 3488 - DNA, 17 bp, Homo sapiens
cagcctcgtacctagcg

SEQ ID NO: 3489 - DNA, 17 bp, Homo sapiens
cagcctcgtacctagct

SEQ ID NO: 3490 - DNA, 17 bp, Homo sapiens
cagcctcgtactagcct

SEQ ID NO: 3491 - DNA, 18 bp, Homo sapiens
cagcctcgtactagccta

SEQ ID NO: 3492 - DNA, 18 bp, Homo sapiens
cagcctcgtactagccta

SEQ ID NO: 3493 - DNA, 17 bp, Homo sapiens
cagctcgacagcctcac

SEQ ID NO: 3494 - DNA, 17 bp, Homo sapiens
caggcctcgtacctagc

SEQ ID NO: 3495 - DNA, 17 bp, Homo sapiens
catgggacacgaagcca

SEQ ID NO: 3496 - DNA, 16 bp, Homo sapiens
ccaccgcaccgttggc

SEQ ID NO: 3497 - DNA, 17 bp, Homo sapiens
ccagcctcgtacctagc

SEQ ID NO: 3498 - DNA, 17 bp, Homo sapiens
ccagcctcgtactagcc

SEQ ID NO: 3499 - DNA, 17 bp, Homo sapiens
ccagcctctacctagcc

SEQ ID NO: 3500 - DNA, 16 bp, Homo sapiens
ccaggcctcgcaccta

SEQ ID NO: 3501 - DNA, 15 bp, Homo sapiens
ccaggcctcgcgtcc

SEQ ID NO: 3502 - DNA, 17 bp, Homo sapiens
ccaggcctcgtacctag

SEQ ID NO: 3503 - DNA, 17 bp, Homo sapiens
ccaggctcgtacctagc

SEQ ID NO: 3504 - DNA, 15 bp, Homo sapiens
ccaggggccagcacg

SEQ ID NO: 3505 - DNA, 18 bp, Homo sapiens
ccaggtttgagggctcaa

SEQ ID NO: 3506 - DNA, 17 bp, Homo sapiens
ccagtcgcaggttcagc

SEQ ID NO: 3507 - DNA, 19 bp, Homo sapiens
ccagtgttcagtcaccata

SEQ ID NO: 3508 - DNA, 17 bp, Homo sapiens
ccatcgctactacattt

SEQ ID NO: 3509 - DNA, 17 bp, Homo sapiens
cccagcctcgtacctag

SEQ ID NO: 3510 - DNA, 16 bp, Homo sapiens
cccaggcctcgcacct

SEQ ID NO: 3511 - DNA, 17 bp, Homo sapiens
cccattagagccaggat

SEQ ID NO: 3512 - DNA, 16 bp, Homo sapiens
ccccaagggaccccag

SEQ ID NO: 3513 - DNA, 15 bp, Homo sapiens
cccccgccatcacgc

SEQ ID NO: 3514 - DNA, 16 bp, Homo sapiens
ccctcggccgattcac

SEQ ID NO: 3515 - DNA, 16 bp, Homo sapiens
ccgaacgcgtgggtcg

SEQ ID NO: 3516 - DNA, 15 bp, Homo sapiens
ccgacccacgcgtcc

SEQ ID NO: 3517 - DNA, 17 bp, Homo sapiens
ccgattaacacccagcc

SEQ ID NO: 3518 - DNA, 18 bp, Homo sapiens
ccgattaacacccagcct

SEQ ID NO: 3519 - DNA, 17 bp, Homo sapiens
ccgattaacaccggcct

SEQ ID NO: 3520 - DNA, 17 bp, Homo sapiens
ccgattaaccccgcctc

SEQ ID NO: 3521 - DNA, 16 bp, Homo sapiens
ccgattaaccccggcc

SEQ ID NO: 3522 - DNA, 17 bp, Homo sapiens
ccgattaaccccggcct

SEQ ID NO: 3523 - DNA, 17 bp, Homo sapiens
ccgattcaacacccagc

SEQ ID NO: 3524 - DNA, 17 bp, Homo sapiens
ccgattcacacccagcc

SEQ ID NO: 3525 - DNA, 16 bp, Homo sapiens
ccgattcacacccggc

SEQ ID NO: 3526 - DNA, 16 bp, Homo sapiens
ccggcctcgtacctag

SEQ ID NO: 3527 - DNA, 16 bp, Homo sapiens
ccggctgctgggtctc

SEQ ID NO: 3528 - DNA, 16 bp, Homo sapiens
cctcgcacctagccgt

SEQ ID NO: 3529 - DNA, 16 bp, Homo sapiens
cctcgctacctagccg

SEQ ID NO: 3530 - DNA, 17 bp, Homo sapiens
cctcgctacctagccta

SEQ ID NO: 3531 - DNA, 17 bp, Homo sapiens
cctcggccgattcacca

SEQ ID NO: 3532 - DNA, 18 bp, Homo sapiens
cctcgtacctagccgtaa

SEQ ID NO: 3533 - DNA, 18 bp, Homo sapiens
cctcgtacctagccgtat

SEQ ID NO: 3534 - DNA, 17 bp, Homo sapiens
cctcgtacctagccgtt

SEQ ID NO: 3535 - DNA, 18 bp, Homo sapiens
cctcgtacctagccgtta

SEQ ID NO: 3536 - DNA, 18 bp, Homo sapiens
cctcgtacctagcctaag

SEQ ID NO: 3537 - DNA, 17 bp, Homo sapiens
cctcgtacctagcctag

SEQ ID NO: 3538 - DNA, 18 bp, Homo sapiens
cctcgtacctagcctata

SEQ ID NO: 3539 - DNA, 18 bp, Homo sapiens
cctcgtactagcctaagt

SEQ ID NO: 3540 - DNA, 17 bp, Homo sapiens
cgagactctgtttggtc

SEQ ID NO: 3541 - DNA, 17 bp, Homo sapiens
cgatagcgctgaccact

SEQ ID NO: 3542 - DNA, 18 bp, Homo sapiens
cgattaacaccagcctcg

SEQ ID NO: 3543 - DNA, 18 bp, Homo sapiens
cgattaacaccaggcctc

SEQ ID NO: 3544 - DNA, 17 bp, Homo sapiens
cgattaacacccggcct

SEQ ID NO: 3545 - DNA, 18 bp, Homo sapiens
cgattcaaacccagcctc

SEQ ID NO: 3546 - DNA, 17 bp, Homo sapiens
cgattcaacacccggcc

SEQ ID NO: 3547 - DNA, 17 bp, Homo sapiens
cgattcacacccagcct

SEQ ID NO: 3548 - DNA, 17 bp, Homo sapiens
cgattcacacccgcctc

SEQ ID NO: 3549 - DNA, 16 bp, Homo sapiens
cgattcaccacccgcc

SEQ ID NO: 3550 - DNA, 16 bp, Homo sapiens
cgattcaccacccggc

SEQ ID NO: 3551 - DNA, 16 bp, Homo sapiens
cgattcacccccggcc

SEQ ID NO: 3552 - DNA, 16 bp, Homo sapiens
cgattcaccccggcct

SEQ ID NO: 3553 - DNA, 16 bp, Homo sapiens
cgccaccagtccagac

SEQ ID NO: 3554 - DNA, 16 bp, Homo sapiens
cgccccccggacatta

SEQ ID NO: 3555 - DNA, 17 bp, Homo sapiens
cgcctcggccgattaac

SEQ ID NO: 3556 - DNA, 15 bp, Homo sapiens
cgcgacgcgtgggtc

SEQ ID NO: 3557 - DNA, 16 bp, Homo sapiens
cgcggggaagcaggag

SEQ ID NO: 3558 - DNA, 16 bp, Homo sapiens
cgctcccatgcttgcg

SEQ ID NO: 3559 - DNA, 16 bp, Homo sapiens
cgcttgcgccgtttcc

SEQ ID NO: 3560 - DNA, 16 bp, Homo sapiens
cggagtgctcgcggag

SEQ ID NO: 3561 - DNA, 14 bp, Homo sapiens
cggcccgcgcgcca

SEQ ID NO: 3562 - DNA, 17 bp, Homo sapiens
cggccgattaacacccg

SEQ ID NO: 3563 - DNA, 17 bp, Homo sapiens
cggccgattcacaccag

SEQ ID NO: 3564 - DNA, 17 bp, Homo sapiens
cggccgattcacaccca

SEQ ID NO: 3565 - DNA, 16 bp, Homo sapiens
cggccgattcaccccc

SEQ ID NO: 3566 - DNA, 16 bp, Homo sapiens
cggcctcgtacctagc

SEQ ID NO: 3567 - DNA, 16 bp, Homo sapiens
cggcctcgtcctagcc

SEQ ID NO: 3568 - DNA, 19 bp, Homo sapiens
cgtacctagccgtaagttt

SEQ ID NO: 3569 - DNA, 17 bp, Homo sapiens
cgtccgattcacacccg

SEQ ID NO: 3570 - DNA, 18 bp, Homo sapiens
ctccagaggcaagttcag

SEQ ID NO: 3571 - DNA, 16 bp, Homo sapiens
ctcccctcggccgatt

SEQ ID NO: 3572 - DNA, 17 bp, Homo sapiens
ctcgccgattcacaccc

SEQ ID NO: 3573 - DNA, 17 bp, Homo sapiens
ctcgctacctagccgta

SEQ ID NO: 3574 - DNA, 17 bp, Homo sapiens
ctcggccgatcaacacc

SEQ ID NO: 3575 - DNA, 17 bp, Homo sapiens
ctcggccgattaacacc

SEQ ID NO: 3576 - DNA, 17 bp, Homo sapiens
ctcggccgattacacac

SEQ ID NO: 3577 - DNA, 17 bp, Homo sapiens
ctcggccgattacaccc

SEQ ID NO: 3578 - DNA, 17 bp, Homo sapiens
ctcggccgattcaaccc

SEQ ID NO: 3579 - DNA, 17 bp, Homo sapiens
ctcggccgattcacacc

SEQ ID NO: 3580 - DNA, 17 bp, Homo sapiens
ctcggccgattcaccac

SEQ ID NO: 3581 - DNA, 16 bp, Homo sapiens
ctcggccgattcaccc

SEQ ID NO: 3582 - DNA, 18 bp, Homo sapiens
ctcgggggctgtaatcat

SEQ ID NO: 3583 - DNA, 18 bp, Homo sapiens
ctcgtacctagccgtaag

SEQ ID NO: 3584 - DNA, 18 bp, Homo sapiens
ctcgtacctagccgtagt

SEQ ID NO: 3585 - DNA, 19 bp, Homo sapiens
ctcgtacctagcctaagtt

SEQ ID NO: 3586 - DNA, 17 bp, Homo sapiens
ctcgtccgattcacccc

SEQ ID NO: 3587 - DNA, 17 bp, Homo sapiens
ctctcgggggctgtaat

SEQ ID NO: 3588 - DNA, 17 bp, Homo sapiens
ctgcctgatatagttct

SEQ ID NO: 3589 - DNA, 16 bp, Homo sapiens
ctggagagccccagcg

SEQ ID NO: 3590 - DNA, 17 bp, Homo sapiens
cttaaaccaagctagcc

SEQ ID NO: 3591 - DNA, 17 bp, Homo sapiens
cttctttagggactctg

SEQ ID NO: 3592 - DNA, 16 bp, Homo sapiens
gaacgccacccaggcc

SEQ ID NO: 3593 - DNA, 18 bp, Homo sapiens
gaccccaactttcagatc

SEQ ID NO: 3594 - DNA, 16 bp, Homo sapiens
gacccggaccgctcat

SEQ ID NO: 3595 - DNA, 16 bp, Homo sapiens
gagacgccacccaggc

SEQ ID NO: 3596 - DNA, 17 bp, Homo sapiens
gaggaagtaatctgccc

SEQ ID NO: 3597 - DNA, 16 bp, Homo sapiens
gagggggcccttcgga

SEQ ID NO: 3598 - DNA, 17 bp, Homo sapiens
gattcaccaccggcctc

SEQ ID NO: 3599 - DNA, 17 bp, Homo sapiens
gattcacccccagcctc

SEQ ID NO: 3600 - DNA, 16 bp, Homo sapiens
gattcacccccgcctc

SEQ ID NO: 3601 - DNA, 17 bp, Homo sapiens
gcacatcctgcaccctt

SEQ ID NO: 3602 - DNA, 17 bp, Homo sapiens
gcaccagcttgggaagc

SEQ ID NO: 3603 - DNA, 15 bp, Homo sapiens
gcagcgggacccgct

SEQ ID NO: 3604 - DNA, 16 bp, Homo sapiens
gcatgctctgcgggtc

SEQ ID NO: 3605 - DNA, 15 bp, Homo sapiens
gcccccccggaggag

SEQ ID NO: 3606 - DNA, 17 bp, Homo sapiens
gccgattaacaccagcc

SEQ ID NO: 3607 - DNA, 17 bp, Homo sapiens
gccgattaacacccgcc

SEQ ID NO: 3608 - DNA, 17 bp, Homo sapiens
gccgattaacacccggc

SEQ ID NO: 3609 - DNA, 17 bp, Homo sapiens
gccgattaacaccgagc

SEQ ID NO: 3610 - DNA, 17 bp, Homo sapiens
gccgattaacacgcggc

SEQ ID NO: 3611 - DNA, 17 bp, Homo sapiens
gccgattaaccccgcct

SEQ ID NO: 3612 - DNA, 17 bp, Homo sapiens
gccgattcacaccagcc

SEQ ID NO: 3613 - DNA, 17 bp, Homo sapiens
gccgattcacacccagc

SEQ ID NO: 3614 - DNA, 16 bp, Homo sapiens
gccgattcacacccgg

SEQ ID NO: 3615 - DNA, 16 bp, Homo sapiens
gccgattcacaccggc

SEQ ID NO: 3616 - DNA, 16 bp, Homo sapiens
gccgattcaccacccg

SEQ ID NO: 3617 - DNA, 16 bp, Homo sapiens
gcctcgcacctagccg

SEQ ID NO: 3618 - DNA, 17 bp, Homo sapiens
gcctcgctacctagcct

SEQ ID NO: 3619 - DNA, 17 bp, Homo sapiens
gcctcggccgattaaca

SEQ ID NO: 3620 - DNA, 16 bp, Homo sapiens
gcctcgtacctagccc

SEQ ID NO: 3621 - DNA, 16 bp, Homo sapiens
gcctcgtacctagccg

SEQ ID NO: 3622 - DNA, 17 bp, Homo sapiens
gcctcgtacctagccga

SEQ ID NO: 3623 - DNA, 17 bp, Homo sapiens
gcctcgtacctagccgt

SEQ ID NO: 3624 - DNA, 17 bp, Homo sapiens
gcctcgtacctagccta

SEQ ID NO: 3625 - DNA, 18 bp, Homo sapiens
gcctcgtacctagcctaa

SEQ ID NO: 3626 - DNA, 18 bp, Homo sapiens
gcctcgtacctagcctat

SEQ ID NO: 3627 - DNA, 18 bp, Homo sapiens
gcctcgtacctagccttt

SEQ ID NO: 3628 - DNA, 19 bp, Homo sapiens
gcctctcttctaaggtact

SEQ ID NO: 3629 - DNA, 16 bp, Homo sapiens
ggaacccggctcatgc

SEQ ID NO: 3630 - DNA, 17 bp, Homo sapiens
ggaatcgccactcaggc

SEQ ID NO: 3631 - DNA, 16 bp, Homo sapiens
ggatgtccctgctggg

SEQ ID NO: 3632 - DNA, 16 bp, Homo sapiens
ggcactctggagccgt

SEQ ID NO: 3633 - DNA, 16 bp, Homo sapiens
ggccaaacgagggcac

SEQ ID NO: 3634 - DNA, 16 bp, Homo sapiens
ggccccccgaacatag

SEQ ID NO: 3635 - DNA, 17 bp, Homo sapiens
ggccgattaacacccgg

SEQ ID NO: 3636 - DNA, 16 bp, Homo sapiens
ggccgattaacccccg

SEQ ID NO: 3637 - DNA, 16 bp, Homo sapiens
ggccgattcacacccg

SEQ ID NO: 3638 - DNA, 16 bp, Homo sapiens
ggccgattcaccaccg

SEQ ID NO: 3639 - DNA, 16 bp, Homo sapiens
ggccgattcaccccag

SEQ ID NO: 3640 - DNA, 16 bp, Homo sapiens
ggccgattcaccccca

SEQ ID NO: 3641 - DNA, 17 bp, Homo sapiens
ggccgatttacacccgg

SEQ ID NO: 3642 - DNA, 16 bp, Homo sapiens
ggcctcgtacctagcc

SEQ ID NO: 3643 - DNA, 16 bp, Homo sapiens
ggcggatcggccaagg

SEQ ID NO: 3644 - DNA, 16 bp, Homo sapiens
ggcttgaaggccggtc

SEQ ID NO: 3645 - DNA, 17 bp, Homo sapiens
gggaagcaagtgatgga

SEQ ID NO: 3646 - DNA, 16 bp, Homo sapiens
gggcctcgtacctagc

SEQ ID NO: 3647 - DNA, 18 bp, Homo sapiens
ggggctgtaatcatcctc

SEQ ID NO: 3648 - DNA, 16 bp, Homo sapiens
gggtgatgtccgtcgg

SEQ ID NO: 3649 - DNA, 16 bp, Homo sapiens
ggtccgacgcgtgggt

SEQ ID NO: 3650 - DNA, 16 bp, Homo sapiens
ggtgcagccccagcag

SEQ ID NO: 3651 - DNA, 17 bp, Homo sapiens
gtaggatccatccagac

SEQ ID NO: 3652 - DNA, 18 bp, Homo sapiens
gtaggatccatccagacc

SEQ ID NO: 3653 - DNA, 19 bp, Homo sapiens
gtattcagctccatctggt

SEQ ID NO: 3654 - DNA, 18 bp, Homo sapiens
gtcctcatcagtattctc

SEQ ID NO: 3655 - DNA, 17 bp, Homo sapiens
gtcggaatcccacccag

SEQ ID NO: 3656 - DNA, 17 bp, Homo sapiens
gtctcccgtttctgctc

SEQ ID NO: 3657 - DNA, 17 bp, Homo sapiens
gtctggtctcctcgctg

SEQ ID NO: 3658 - DNA, 17 bp, Homo sapiens
gtgacttcgcccagctg

SEQ ID NO: 3659 - DNA, 16 bp, Homo sapiens
gtggtcgcgacgcgtg

SEQ ID NO: 3660 - DNA, 19 bp, Homo sapiens
gtgtgctaacacacatagc

SEQ ID NO: 3661 - DNA, 17 bp, Homo sapiens
gtgttgttgtgtgtcgt

SEQ ID NO: 3662 - DNA, 20 bp, Homo sapiens
taacaggagattaacagagg

SEQ ID NO: 3663 - DNA, 17 bp, Homo sapiens
tataattaaggaagatt

SEQ ID NO: 3664 - DNA, 17 bp, Homo sapiens
tatactctgactccgaa

SEQ ID NO: 3665 - DNA, 18 bp, Homo sapiens
tcaccagttccgaccaga

SEQ ID NO: 3666 - DNA, 18 bp, Homo sapiens
tcagacaaacacagatcg

SEQ ID NO: 3667 - DNA, 17 bp, Homo sapiens
tcagactagttctctcc

SEQ ID NO: 3668 - DNA, 18 bp, Homo sapiens
tcagcgccactccatgtt

SEQ ID NO: 3669 - DNA, 19 bp, Homo sapiens
tcatcagtggtatgcctca

SEQ ID NO: 3670 - DNA, 16 bp, Homo sapiens
tccgcgacgcgtgggt

SEQ ID NO: 3671 - DNA, 16 bp, Homo sapiens
tccggggacgcctcag

SEQ ID NO: 3672 - DNA, 17 bp, Homo sapiens
tcggccgattaacaccc

SEQ ID NO: 3673 - DNA, 17 bp, Homo sapiens
tcggccgattaacccca

SEQ ID NO: 3674 - DNA, 16 bp, Homo sapiens
tcggccgattaccccc

SEQ ID NO: 3675 - DNA, 16 bp, Homo sapiens
tcggccgattaccccg

SEQ ID NO: 3676 - DNA, 17 bp, Homo sapiens
tcggccgattcaaaccc

SEQ ID NO: 3677 - DNA, 17 bp, Homo sapiens
tcggccgattcacaccc

SEQ ID NO: 3678 - DNA, 17 bp, Homo sapiens
tcggccgattcacccca

SEQ ID NO: 3679 - DNA, 16 bp, Homo sapiens
tcggccgattcacccg

SEQ ID NO: 3680 - DNA, 18 bp, Homo sapiens
tcgtacctagccgtaagt

SEQ ID NO: 3681 - DNA, 19 bp, Homo sapiens
tcgtacctagccgtatatt

SEQ ID NO: 3682 - DNA, 17 bp, Homo sapiens
tctccacatgttcttgg

SEQ ID NO: 3683 - DNA, 17 bp, Homo sapiens
tcttctgtctctttttc

SEQ ID NO: 3684 - DNA, 18 bp, Homo sapiens
tgacgattgttgtagatc

SEQ ID NO: 3685 - DNA, 17 bp, Homo sapiens
tgagagcgctgtcatct

SEQ ID NO: 3686 - DNA, 20 bp, Homo sapiens
tgaggaagtttcgaactgta

SEQ ID NO: 3687 - DNA, 17 bp, Homo sapiens
tgaggcggtaccagcac

SEQ ID NO: 3688 - DNA, 22 bp, Homo sapiens
tgatgtaggattttatatttac

SEQ ID NO: 3689 - DNA, 16 bp, Homo sapiens
tgatgtcgctgcgccc

SEQ ID NO: 3690 - DNA, 18 bp, Homo sapiens
tgccaggagacctgttat

SEQ ID NO: 3691 - DNA, 19 bp, Homo sapiens
tggaagacaaagtctccca

SEQ ID NO: 3692 - DNA, 16 bp, Homo sapiens
tggccgtgcgccagct

SEQ ID NO: 3693 - DNA, 17 bp, Homo sapiens
tgggcgtccccattgga

SEQ ID NO: 3694 - DNA, 16 bp, Homo sapiens
tgggtccgacgcgtgg

SEQ ID NO: 3695 - DNA, 17 bp, Homo sapiens
tgtttgcaagccaaaga

SEQ ID NO: 3696 - DNA, 17 bp, Homo sapiens
ttcccagggtgcagtca

SEQ ID NO: 3697 - DNA, 16 bp, Homo sapiens
ttccccggacgccggt

SEQ ID NO: 3698 - DNA, 18 bp, Homo sapiens
ttggacgattggtgttag

SEQ ID NO: 3699 - DNA, 20 bp, Homo sapiens
ttttttgtttgttgtgtgtt

SEQ ID NO: 3700 - DNA, 17 bp, Artificial Sequence
  Description of Artificial Sequence: Synthetic oligonucleotide
cgcatgcgtggccacca

1. A method of creating a cancer profile for a subject having or suspected of having cancer comprising:
isolating mRNA from a tissue sample from the subject;
screening the mRNA for at least one cancer detection reagent selected from the group consisting of any oligo from Table 1, and any combination thereof to determine the presence or absence of the cancer detection reagent in the mRNA; and
collating the screening results in a cancer profile indicating the presence or absence of each tested cancer detection reagent in the mRNA.

2. The method of claim 1, wherein the tissue sample comprises peripheral blood.

3. The method of claim 1, further comprising screening the mRNA for at least two cancer detection reagents selected from the group consisting of any oligio from Table 1, and any combination thereof.

4. The method of claim 1, further comprising screening the mRNA for at least 10 cancer detection reagent nucleic acid sequences selected from the group consisting of any oligo from Table 1, and any combination thereof.

5. The method of claim 1, further comprising screening the mRNA for at least 20 cancer detection reagent nucleic acid sequences selected from the group consisting of any oligo from Table 1, and any combination thereof.

6. The method of claim 1, further comprising screening the mRNA for at least 50 cancer detection reagent nucleic acid sequences selected from the group consisting of any oligo from Table 1, and any combination thereof.

7. The method of claim 1, further comprising screening the mRNA for at least 100 cancer detection reagent nucleic acid sequences selected from the group consisting of any oligo from Table 1, and any combination thereof.

8. A method of inducing targeted cancer cell death in a cancer cell comprising administering to the cancer cell at least one antibody targeted to a peptide encoded by a cancer detection reagent nucleic acid sequence selected from the group consisting of any oligo from Table 1, and any combination thereof.

9. The method of claim 8, further comprising administering the antibody to a cancer cell located in a human subject.

10. The method of claim 8, further comprising administering at least two antibodies.

11. The method of claim 8, wherein the antibody comprises a monoclonal antibody.

12. The method of claim 8, wherein the antibody comprises a polyclonal antibody.

13. A method of inducing targeted cancer cell death in a cancer cell comprising administering to the cancer cell at least one siRNA molecule including a cancer detection reagent selected from the group consisting of any oligo from Table 1, and any combination thereof, wherein administering the siRNA molecule results in destruction of cellular mRNA containing the cancer detection reagent.

14. The method of claim 13, further comprising administering the siRNA molecule to a cancer cell in a human subject.

15. The method of claim 13, further comprising administering to the cancer cell a plasmid encoding the siRNA molecule and operable to produce the siRNA molecule in the cancer cell.

16. The method of claim 15, further comprising administering the plasmid in a delivery vehicle.

17. The method of claim 16, wherein the delivery vehicle comprises a liposome.

18. A cancer detection reagent set comprising at least two of any oligo from Table 1.

19. A cancer detection reagent set comprising at least five of any oligo from Table 1.

20. A cancer detection reagent set comprising at least ten of any oligo from Table 1.

21. A cancer detection reagent set comprising at least twenty of any oligo from Table 1.

22. A cancer detection reagent set comprising at least fifty of any oligo from Table 1.

23. A cancer detection reagent set comprising at least one hundred of any oligo from Table 1.

24. A method of detecting a cancer detection reagent in a sample comprising:
contacting the sample with a cancer detection reagent; and determining if nucleic acids containing the cancer detection reagent are present in the sample.

25. The method of claim 24, wherein PCR is performed on the sample using a single primer for a cancer detection reagent to produce a PCR product; and analyzing the PCR product to determine if PCR amplified nucleic acids containing the cancer detection reagent are present in the sample.

26. The method of claim 25, wherein the primer comprises a 5′ primer.

27. The method of claim 24, wherein the sample comprises cDNA.

28. The method of claim 27, further comprising the cDNA derived from a blood or tissue sample.

29. The method of claim 25, wherein analyzing further comprises size-based electrophoretic separation of the PCR product.

30. The method of claim 25, wherein the PCR product comprises a plurality of amplified DNA molecules of multiple lengths, each containing a primer.
